(19) United States
(12) Patent Application Publication
(10) Pub. No.: US 2020/0071405 A1
(43) Pub. Date: Mar. 5, 2020

(54) ANTIBODY CONSTRUCTS FOR CDH19 AND CD3

(71) Applicants: AMGEN RESEARCH (MUNICH) GMBH, Munich (DE); AMGEN INC., Thousand Oaks, CA (US)

(72) Inventors: Shouhua Xiao, Foster City, CA (US); Zheng Pan, Fremont, CA (US); Dineli Wickramasinghe, San Francisco, CA (US); M. Shawn Jeffries, Indianapolis, IN (US); Chadwick Terence King, North Vancouver (CA); Brian Mingtung Chan, Port Coquitlam (CA); Peter Kufer, Munich (DE); Ralf Lutterbüse, Munich (DE); Tobias Raum, Munich (DE); Patrick Hoffmann, Munich (DE); Doris Rau, Munich (DE); Roman Kischel, Munich (DE); Bryan Lemon, Mountain View, CA (US); Holger Wesche, San Francisco, CA (US)

(21) Appl. No.: 16/570,129

(22) Filed: Sep. 13, 2019

Related U.S. Application Data
(63) Continuation of application No. 14/165,330, filed on Jan. 27, 2014, now abandoned.
(60) Provisional application No. 61/785,147, filed on Mar. 14, 2013.
(60) Provisional application No. 61/756,991, filed on Jan. 25, 2013.

(51) Int. Cl. C07K 16/28; C07K 16/30; A61K 47/60; C07K 16/46

(52) U.S. Cl. CPC C07K 16/2809; C07K 16/28; C07K 16/3053; A61K 2039/505; C07K 16/2896; C07K 16/468; A61K 47/60

(57) ABSTRACT

The present invention provides to a antibody construct comprising a first human binding domain capable of binding to human CDH19 on the surface of a target cell and a second domain capable of binding to human CD3 on the surface of a T cell. Moreover, the invention relates to a nucleic acid sequence encoding the antibody construct, a vector comprising said nucleic acid sequence and a host cell transformed or transfected with said vector. Furthermore, the invention relates a process for the production of the antibody construct of the invention, a medical use of said antibody construct and a kit comprising said antibody construct.

### RELATED APPLICATIONS

[0001] This application is related to a U.S. provisional application entitled “Antibodies targeting CDH19 for melanoma”, filed on Mar. 15, 2013, the same day as the present application is filed. This related application is incorporated in its entirety by reference.

### FIELD OF THE INVENTION

[0002] The present invention relates to an antibody construct comprising a first human binding domain capable of binding to human CDH19 on the surface of a target cell and a second domain capable of binding to human CD3 on the surface of a T cell. Moreover, the invention provides a nucleic acid sequence encoding the antibody construct, a vector comprising said nucleic acid sequence and a host cell transformed or transfected with said vector. Furthermore, the invention provides a process for the production of the antibody construct of the invention, a medical use of said antibody construct and a kit comprising said antibody construct.

### BACKGROUND OF THE INVENTION

[0003] Melanoma is a skin cancer that is caused by the oncogenic transformation of melanocytes, which are pigment producing skin cells. As of 2009, Melanoma had a prevalence of more than 870,000 cases in the US alone (US National Institutes of Health). Each year, over 75,000 new cases of melanoma are diagnosed in the US, and approximately 25% of patients have advanced disease at the time of diagnosis. Despite the fact that cases of primary melanoma can be cured by surgery if they are detected early enough, melanoma is the leading cause of death from skin disease in the US, responsible for about 10,000 deaths per year in the US. Once the disease has spread and became metastatic, the prognosis is poor, with a 5 year relative survival of 15%.

[0004] There are four basic types of melanomas. Three types are found in the top layers of the skin and the fourth one is invasive and has penetrated deeper into the skin and may have spread to other areas of the body.

[0005] Superficial spreading melanoma is the most common type of melanoma which accounts for about 70% of all cases. It grows along the top layer of the skin for a fairly long time before penetrating more deeply. It first appears as a flat or slightly raised discolored patch that has irregular borders and may be somewhat asymmetrical in form. The color varies, and you may see areas of tan, brown, black, red, blue or white. This type of melanoma can occur in a previously benign mole and is found most often in young people.

[0006] Lentigo maligna is similar to the superficial spreading type, as it also remains close to the skin surface for quite a while, and usually appears as a flat or mildly elevated mottled tan, brown or dark brown discoloration. It is found most often in the elderly. When this cancer becomes invasive, it is referred to as lentigo maligna melanoma.

[0007] Acral lentiginous melanoma also spreads superficially before penetrating more deeply. It is quite different from the others, though, as it usually appears as a black or brown discoloration under the nails or on the soles of the feet or palms of the hands. This type of melanoma is sometimes found on dark-skinned people, and can often advance more quickly than superficial spreading melanoma and lentigo maligna.

[0008] Nodular melanoma is usually invasive at the time it is first diagnosed. The malignancy is recognized when it becomes a bump. It is usually black, but occasionally is blue, gray, white, brown, tan, red or skin tone. This is the most aggressive of the melanomas, and is found in 10 to 15 percent of cases.

[0009] Common treatments for metastatic melanoma include chemotherapy, targeted therapies for eligible patients (e.g. BRAF inhibitor treatment for patients with BRAF mutations) and immunotherapy. Metastatic melanoma is a tumor type where immunotherapy has been demonstrated to not only slow disease progression, but to lead to cures in late stage patients. Interleukin-2 was approved for the use in metastatic melanoma in 1998, and in 2011 an antibody targeting CTLA4, a member of a new generation of immune checkpoint inhibitors, gained approval by the FDA.

[0010] CDH19 is a type II cadherin transmembrane protein of unknown function. The human gene was cloned in 2000 based on its sequence similarity to CDH7 (Kools, P. et al. Genomics. 2000). Expressed Sequence Tags (ESTs) for CDH19 were isolated from melanocyte cDNA libraries, indicating that expression of CDH19 may be limited to cells of neural crest origin (Kools, P. et al. Genomics. 2000). In support of this notion, rat CDH19 was found to be expressed primarily in nerve ganglia and in Schwann cells during rat embryonic development (Takahashi, M. and Osumi, O. Devl Dynamics. 2005.).

[0011] Diagnostic antibodies detecting CDH19 in Western Blot, immunohistochemitstry or flow cytometry are known in the art and commercially available. Those antibodies comprise poly- and monoclonal antibodies generated in animal hosts.

### SUMMARY OF THE INVENTION

[0012] The present invention provides an isolated multispecific antibody construct comprising a first human binding domain capable of binding to human CDH19 on the surface of a target cell and a second domain capable of binding to human CD3 on the surface of a T cell.

[0013] In one embodiment the antibody construct of the invention the first binding domain comprises a VH region comprising CDR-H1, CDR-H2 and CDR-H3 and a VL region comprising CDR-L1, CDR-L2 and CDR-L3 selected from the group consisting of:
[0014] (a) CDR-H1 as depicted in SEQ ID NO: 52, CDR-H2 as depicted in SEQ ID NO: 53, CDR-H3 as depicted in SEQ ID NO: 54, CDR-L1 as depicted in SEQ ID NO: 220, CDR-L2 as depicted in SEQ ID NO: 221 and CDR-L3 as depicted in SEQ ID NO: 222, CDR-H1 as depicted in SEQ ID NO: 82, CDR-H2 as depicted in SEQ ID NO: 83, CDR-H3 as depicted in SEQ ID NO: 84, CDR-L1 as depicted in SEQ ID NO: 250, CDR-L2 as depicted in SEQ ID NO: 251 and CDR-L3 as depicted in SEQ ID NO: 252, CDR-H1 as depicted in SEQ ID NO: 82, CDR-H2 as depicted in SEQ ID NO: 83, CDR-H3 as depicted in SEQ ID NO: 84, CDR-L1 as depicted in SEQ ID NO: 250, CDR-L2 as depicted in SEQ ID NO: 251 and CDR-L3 as depicted in SEQ ID NO: 927, CDR-H1 as depicted in SEQ ID NO: 82, CDR-H2 as depicted in SEQ ID NO: 83, CDR-H3 as depicted in SEQ ID NO: 909, CDR-L1 as depicted in SEQ ID NO: 250, CDR-L2 as depicted in SEQ ID NO: 251 and CDR-L3 as depicted in SEQ ID NO: 927, CDR-H1 as depicted in SEQ ID NO: 52, CDR-H2 as depicted in SEQ ID NO: 53, CDR-H3 as depicted in SEQ ID NO: 54, CDR-L1 as depicted in SEQ ID NO: 220, CDR-L2 as depicted in SEQ ID NO: 221 and CDR-L3 as depicted in SEQ ID NO: 926, CDR-H1 as depicted in SEQ ID NO: 52, CDR-H2 as depicted in SEQ ID NO: 53, CDR-H3 as depicted in SEQ ID NO: 904, CDR-L1 as depicted in SEQ ID NO: 220, CDR-L2 as depicted in SEQ ID NO: 221 and CDR-L3 as depicted in SEQ ID NO: 926,
   [0015] CDR-H1 as depicted in SEQ ID NO: 1126, CDR-H2 as depicted in SEQ ID NO: 1127, CDR-H3 as depicted in SEQ ID NO: 1128, CDR-L1 as depicted in SEQ ID NO: 1129, CDR-L2 as depicted in SEQ ID NO: 1130 and CDR-L3 as depicted in SEQ ID NO: 1131,
   [0016] CDR-H1 as depicted in SEQ ID NO: 1165, CDR-H2 as depicted in SEQ ID NO: 1166, CDR-H3 as depicted in SEQ ID NO: 1167, CDR-L1 as depicted in SEQ ID NO: 1168, CDR-L2 as depicted in SEQ ID NO: 1169 and CDR-L3 as depicted in SEQ ID NO: 1170,
   [0017] CDR-H1 as depicted in SEQ ID NO: 1334, CDR-H2 as depicted in SEQ ID NO: 1335, CDR-H3 as depicted in SEQ ID NO: 1336, CDR-L1 as depicted in SEQ ID NO: 1337, CDR-L2 as depicted in SEQ ID NO: 1338 and CDR-L3 as depicted in SEQ ID NO: 1339,
   [0018] CDR-H1 as depicted in SEQ ID NO: 1347, CDR-H2 as depicted in SEQ ID NO: 1348, CDR-H3 as depicted in SEQ ID NO: 1349, CDR-L1 as depicted in SEQ ID NO: 1350, CDR-L2 as depicted in SEQ ID NO: 1351 and CDR-L3 as depicted in SEQ ID NO: 1352, and
   [0019] CDR-H1 as depicted in SEQ ID NO: 1360 CDR-H2 as depicted in SEQ ID NO: 1361, CDR-H3 as depicted in SEQ ID NO: 1362, CDR-L1 as depicted in SEQ ID NO: 1363, CDR-L2 as depicted in SEQ ID NO: 1364 and CDR-L3 as depicted in SEQ ID NO: 1365,
   [0020] CDR-H1 as depicted in SEQ ID NO: 1425 CDR-H2 as depicted in SEQ ID NO: 1426, CDR-H3 as depicted in SEQ ID NO: 1427, CDR-L1 as depicted in SEQ ID NO: 1428, CDR-L2 as depicted in SEQ ID NO: 1429 and CDR-L3 as depicted in SEQ ID NO: 1430,
   [0021] CDR-H1 as depicted in SEQ ID NO: 1438 CDR-H2 as depicted in SEQ ID NO: 1439, CDR-H3 as depicted in SEQ ID NO: 1440, CDR-L1 as depicted in SEQ ID NO: 1441, CDR-L2 as depicted in SEQ ID NO: 1442 and CDR-L3 as depicted in SEQ ID NO: 1443;
[0022] (b) CDR-H1 as depicted in SEQ ID NO: 124, CDR-H2 as depicted in SEQ ID NO: 125, CDR-H3 as depicted in SEQ ID NO: 126, CDR-L1 as depicted in SEQ ID NO: 292, CDR-L2 as depicted in SEQ ID NO: 293 and CDR-L3 as depicted in SEQ ID NO: 294, CDR-H1 as depicted in SEQ ID NO: 130, CDR-H2 as depicted in SEQ ID NO: 131, CDR-H3 as depicted in SEQ ID NO: 132, CDR-L1 as depicted in SEQ ID NO: 298, CDR-L2 as depicted in SEQ ID NO: 299 and CDR-L3 as depicted in SEQ ID NO: 300, CDR-H1 as depicted in SEQ ID NO: 136, CDR-H2 as depicted in SEQ ID NO: 137, CDR-H3 as depicted in SEQ ID NO: 138, CDR-L1 as depicted in SEQ ID NO: 304, CDR-L2 as depicted in SEQ ID NO: 305 and CDR-L3 as depicted in SEQ ID NO: 306, CDR-H1 as depicted in SEQ ID NO: 142, CDR-H2 as depicted in SEQ ID NO: 143, CDR-H3 as depicted in SEQ ID NO: 144, CDR-L1 as depicted in SEQ ID NO: 310, CDR-L2 as depicted in SEQ ID NO: 311 and CDR-L3 as depicted in SEQ ID NO: 312, CDR-H1 as depicted in SEQ ID NO: 148, CDR-H2 as depicted in SEQ ID NO: 149, CDR-H3 as depicted in SEQ ID NO: 150, CDR-L1 as depicted in SEQ ID NO: 316, CDR-L2 as depicted in SEQ ID NO: 317 and CDR-L3 as depicted in SEQ ID NO: 318, CDR-H1 as depicted in SEQ ID NO: 166, CDR-H2 as depicted in SEQ ID NO: 167, CDR-H3 as depicted in SEQ ID NO: 168, CDR-L1 as depicted in SEQ ID NO: 334, CDR-L2 as depicted in SEQ ID NO: 335 and CDR-L3 as depicted in SEQ ID NO: 336, CDR-H1 as depicted in SEQ ID NO: 124, CDR-H2 as depicted in SEQ ID NO: 125, CDR-H3 as depicted in SEQ ID NO: 915, CDR-L1 as depicted in SEQ ID NO: 292, CDR-L2 as depicted in SEQ ID NO: 293 and CDR-L3 as depicted in SEQ ID NO: 294, CDR-H1 as depicted in SEQ ID NO: 124, CDR-H2 as depicted in SEQ ID NO: 125, CDR-H3 as depicted in SEQ ID NO: 915, CDR-L1 as depicted in SEQ ID NO: 292, CDR-L2 as depicted in SEQ ID NO: 293 and CDR-L3 as depicted in SEQ ID NO: 928, CDR-H1 as depicted in SEQ ID NO: 124, CDR-H2 as depicted in SEQ ID NO: 125, CDR-H3 as depicted in SEQ ID NO: 915, CDR-L1 as depicted in SEQ ID NO: 292, CDR-L2 as depicted in SEQ ID NO: 293 and CDR-L3 as depicted in SEQ ID NO: 929, CDR-H1 as depicted in SEQ ID NO: 166, CDR-H2 as depicted in SEQ ID NO: 167, CDR-H3 as depicted in SEQ ID NO: 168, CDR-L1 as depicted in SEQ ID NO: 334, CDR-L2 as depicted in SEQ ID NO: 335 and CDR-L3 as depicted in SEQ ID NO: 336, CDR-H1 as depicted in SEQ ID NO: 166, CDR-H2 as depicted in SEQ ID NO: 167, CDR-H3 as depicted in SEQ ID NO: 168, CDR-L1 as depicted in SEQ ID NO: 334, CDR-L2 as depicted in SEQ ID NO: 335 and CDR-L3 as depicted in SEQ ID NO: 942, CDR-H1 as depicted in SEQ ID NO: 166, CDR-H2 as depicted in SEQ ID NO: 167, CDR-H3 as depicted in SEQ ID NO: 168, CDR-L1 as depicted in SEQ ID NO: 334, CDR-L2 as depicted in SEQ ID NO: 335 and CDR-L3 as depicted in SEQ ID NO: 943, CDR-H1 as depicted in SEQ ID NO: 148, CDR-H2 as depicted in SEQ ID NO: 149, CDR-H3 as depicted in SEQ ID NO: 150, CDR-L1 as depicted in SEQ ID NO: 316, CDR-L2 as depicted in SEQ ID NO: 317 and CDR-L3 as depicted in SEQ ID NO: 318, CDR-H1 as depicted in SEQ ID NO: 148, CDR-H2 as depicted in SEQ ID NO: 149, CDR-H3 as depicted in SEQ ID NO: 150, CDR-L1 as depicted in SEQ ID NO: 316, CDR-L2 as depicted in SEQ ID NO: 317 and CDR-L3 as depicted in SEQ ID NO: 937, CDR-H1 as depicted in SEQ ID NO: 148, CDR-H2 as depicted in SEQ ID NO: 149, CDR-H3 as depicted in SEQ ID NO: 150, CDR-L1 as depicted in SEQ ID NO: 316, CDR-L2 as depicted in SEQ ID NO: 317 and CDR-L3 as depicted in SEQ ID NO: 938, CDR-H1 as depicted in SEQ ID NO: 148, CDR-H2 as depicted in SEQ ID NO: 149, CDR-H3 as depicted in SEQ ID NO: 919, CDR-L1 as depicted in SEQ ID NO: 316, CDR-L2 as depicted in SEQ ID NO: 317 and CDR-L3 as depicted in SEQ ID NO: 938, CDR-H1 as depicted in SEQ ID NO: 142, CDR-H2 as depicted in SEQ ID NO: 143, CDR-H3 as depicted in SEQ ID NO: 144, CDR-L1 as depicted in SEQ ID NO: 310, CDR-L2 as depicted in SEQ ID NO: 311 and CDR-L3 as depicted in SEQ ID NO: 935, CDR-H1 as depicted in SEQ ID NO: 142, CDR-H2 as depicted in SEQ ID NO: 143, CDR-H3 as depicted in SEQ ID NO: 918, CDR-L1 as depicted in SEQ ID NO: 310, CDR-L2 as depicted in SEQ ID NO: 311 and CDR-L3 as depicted in SEQ ID NO: 935, CDR-H1 as depicted in SEQ ID NO: 142, CDR-H2 as depicted in SEQ ID NO: 143, CDR-H3 as depicted in SEQ ID NO: 918, CDR-L1 as depicted in SEQ ID NO: 310, CDR-L2 as depicted in SEQ ID NO: 311 and CDR-L3 as depicted in SEQ ID NO: 936, CDR-H1 as depicted in SEQ ID NO: 136, CDR-H2 as depicted in SEQ ID NO: 137, CDR-H3 as depicted in SEQ ID NO: 138, CDR-L1 as depicted in SEQ ID NO: 304, CDR-L2 as depicted in SEQ ID NO: 305 and CDR-L3 as depicted in SEQ ID NO: 933, CDR-H1 as depicted in SEQ ID NO: 136, CDR-H2 as depicted in SEQ ID NO: 137, CDR-H3 as depicted in SEQ ID NO: 917, CDR-L1 as depicted in SEQ ID NO: 304, CDR-L2 as depicted in SEQ ID NO: 305 and CDR-L3 as depicted in SEQ ID NO: 934, CDR-H1 as depicted in SEQ ID NO: 130, CDR-H2 as depicted in SEQ ID NO: 131, CDR-H3 as depicted in SEQ ID NO: 132, CDR-L1 as depicted in SEQ ID NO: 298, CDR-L2 as depicted in SEQ ID NO: 299 and CDR-L3 as depicted in SEQ ID NO: 930, CDR-H1 as depicted in SEQ ID NO: 130, CDR-H2 as depicted in SEQ ID NO: 131, CDR-H3 as depicted in SEQ ID NO: 916, CDR-L1 as depicted in SEQ ID NO: 298, CDR-L2 as depicted in SEQ ID NO: 299 and CDR-L3 as depicted in SEQ ID NO: 931, CDR-H1 as depicted in SEQ ID NO: 130, CDR-H2 as depicted in SEQ ID NO: 131, CDR-H3 as depicted in SEQ ID NO: 916, CDR-L1 as depicted in SEQ ID NO: 298, CDR-L2 as depicted in SEQ ID NO: 299 and CDR-L3 as depicted in SEQ ID NO: 932, CDR-H1 as depicted in SEQ ID NO: 1009, CDR-H2 as depicted in SEQ ID NO: 1010, CDR-H3 as depicted in SEQ ID NO: 1011, CDR-L1 as depicted in SEQ ID NO: 1012, CDR-L2 as depicted in SEQ ID NO: 1013 and CDR-L3 as depicted in SEQ ID NO: 1014,
   [0023] CDR-H1 as depicted in SEQ ID NO: 1022, CDR-H2 as depicted in SEQ ID NO: 1023, CDR-H3 as depicted in SEQ ID NO: 1024, CDR-L1 as depicted in SEQ ID NO: 1025, CDR-L2 as depicted in SEQ ID NO: 1026 and CDR-L3 as depicted in SEQ ID NO: 1027,
   [0024] CDR-H1 as depicted in SEQ ID NO: 1035, CDR-H2 as depicted in SEQ ID NO: 1036, CDR-H3 as depicted in SEQ ID NO: 1037, CDR-L1 as depicted in SEQ ID NO: 1038, CDR-L2 as depicted in SEQ ID NO: 1039 and CDR-L3 as depicted in SEQ ID NO: 1040,
   [0025] CDR-H1 as depicted in SEQ ID NO: 1074, CDR-H2 as depicted in SEQ ID NO: 1075, CDR-H3 as depicted in SEQ ID NO: 1076, CDR-L1 as depicted in SEQ ID NO: 1077, CDR-L2 as depicted in SEQ ID NO: 1078 and CDR-L3 as depicted in SEQ ID NO: 1079,
   [0026] CDR-H1 as depicted in SEQ ID NO: 1100, CDR-H2 as depicted in SEQ ID NO: 1101, CDR-H3 as depicted in SEQ ID NO: 1102, CDR-L1 as depicted in SEQ ID NO: 1103, CDR-L2 as depicted in SEQ ID NO: 1104 and CDR-L3 as depicted in SEQ ID NO: 1105,
   [0027] CDR-H1 as depicted in SEQ ID NO: 1113, CDR-H2 as depicted in SEQ ID NO: 1114, CDR-H3 as depicted in SEQ ID NO: 1115, CDR-L1 as depicted in SEQ ID NO: 1116, CDR-L2 as depicted in SEQ ID NO: 1117 and CDR-L3 as depicted in SEQ ID NO: 1118,
   [0028] CDR-H1 as depicted in SEQ ID NO: 1243, CDR-H2 as depicted in SEQ ID NO: 1244, CDR-H3 as depicted in SEQ ID NO: 1245, CDR-L1 as depicted in SEQ ID NO: 1246, CDR-L2 as depicted in SEQ ID NO: 1247 and CDR-L3 as depicted in SEQ ID NO: 1248,
   [0029] CDR-H1 as depicted in SEQ ID NO: 1256, CDR-H2 as depicted in SEQ ID NO: 1257, CDR-H3 as depicted in SEQ ID NO: 1258, CDR-L1 as depicted in SEQ ID NO: 1259, CDR-L2 as depicted in SEQ ID NO: 1260 and CDR-L3 as depicted in SEQ ID NO: 1261,
   [0030] CDR-H1 as depicted in SEQ ID NO: 1269, CDR-H2 as depicted in SEQ ID NO: 1270, CDR-H3 as depicted in SEQ ID NO: 1271, CDR-L1 as depicted in SEQ ID NO: 1272, CDR-L2 as depicted in SEQ ID NO: 1273 and CDR-L3 as depicted in SEQ ID NO: 1274,
   [0031] CDR-H1 as depicted in SEQ ID NO: 1282, CDR-H2 as depicted in SEQ ID NO: 1283, CDR-H3 as depicted in SEQ ID NO: 1284, CDR-L1 as depicted in SEQ ID NO: 1285, CDR-L2 as depicted in SEQ ID NO: 1286 and CDR-L3 as depicted in SEQ ID NO: 1287, and
   [0032] CDR-H1 as depicted in SEQ ID NO: 1295, CDR-H2 as depicted in SEQ ID NO: 1296, CDR-H3 as depicted in SEQ ID NO: 1297, CDR-L1 as depicted in SEQ ID NO: 1298, CDR-L2 as depicted in SEQ ID NO: 1299 and CDR-L3 as depicted in SEQ ID NO: 1300;
[0033] (c) CDR-H1 as depicted in SEQ ID NO: 94, CDR-H2 as depicted in SEQ ID NO: 95, CDR-H3 as depicted in SEQ ID NO: 96, CDR-L1 as depicted in SEQ ID NO: 262, CDR-L2 as depicted in SEQ ID NO: 263 and CDR-L3 as depicted in SEQ ID NO: 264, CDR-H1 as depicted in SEQ ID NO: 100, CDR-H2 as depicted in SEQ ID NO: 101, CDR-H3 as depicted in SEQ ID NO: 102, CDR-L1 as depicted in SEQ ID NO: 268, CDR-L2 as depicted in SEQ ID NO: 269 and CDR-L3 as depicted in SEQ ID NO: 270, CDR-H1 as depicted in SEQ ID NO: 118, CDR-H2 as depicted in SEQ ID NO: 119, CDR-H3 as depicted in SEQ ID NO: 120, CDR-L1 as depicted in SEQ ID NO: 286, CDR-L2 as depicted in SEQ ID NO: 287 and CDR-L3 as depicted in SEQ ID NO: 288, CDR-H1 as depicted in SEQ ID NO: 154, CDR-H2 as depicted in SEQ ID NO: 155, CDR-H3 as depicted in SEQ ID NO: 156, CDR-L1 as depicted in SEQ ID NO: 322, CDR-L2 as depicted in SEQ ID NO: 323 and CDR-L3 as depicted in SEQ ID NO: 324, CDR-H1 as depicted in SEQ ID NO: 100, CDR-H2 as depicted in SEQ ID NO: 101, CDR-H3 as depicted in SEQ ID NO: 912, CDR-L1 as depicted in SEQ ID NO: 268, CDR-L2 as depicted in SEQ ID NO: 269 and CDR-L3 as depicted in SEQ ID NO: 270, CDR-H1 as depicted in SEQ ID NO: 100, CDR-H2 as depicted in SEQ ID NO: 101, CDR-H3 as depicted in SEQ ID NO: 913, CDR-L1 as depicted in SEQ ID NO: 268, CDR-L2 as depicted in SEQ ID NO: 269 and CDR-L3 as depicted in SEQ ID NO: 270, CDR-H1 as depicted in SEQ ID NO: 94, CDR-H2 as depicted in SEQ ID NO: 95, CDR-H3 as depicted in SEQ ID NO: 910, CDR-L1 as depicted in SEQ ID NO: 262, CDR-L2 as depicted in SEQ ID NO: 263 and CDR-L3 as depicted in SEQ ID NO: 264, CDR-H1 as depicted in SEQ ID NO: 94, CDR-H2 as depicted in SEQ ID NO: 95, CDR-H3 as depicted in SEQ ID NO: 911, CDR-L1 as depicted in SEQ ID NO: 262, CDR-L2 as depicted in SEQ ID NO: 263 and CDR-L3 as depicted in SEQ ID NO: 264, CDR-H1 as depicted in SEQ ID NO: 118, CDR-H2 as depicted in SEQ ID NO: 119, CDR-H3 as depicted in SEQ ID NO: 120, CDR-L1 as depicted in SEQ ID NO: 286, CDR-L2 as depicted in SEQ ID NO: 287 and CDR-L3 as depicted in SEQ ID NO: 288, CDR-H1 as depicted in SEQ ID NO: 118, CDR-H2 as depicted in SEQ ID NO: 914, CDR-H3 as depicted in SEQ ID NO: 120, CDR-L1 as depicted in SEQ ID NO: 286, CDR-L2 as depicted in SEQ ID NO: 287 and CDR-L3 as depicted in SEQ ID NO: 288, CDR-H1 as depicted in SEQ ID NO: 154, CDR-H2 as depicted in SEQ ID NO: 155, CDR-H3 as depicted in SEQ ID NO: 920, CDR-L1 as depicted in SEQ ID NO: 322, CDR-L2 as depicted in SEQ ID NO: 323 and CDR-L3 as depicted in SEQ ID NO: 324,
[0034] CDR-H1 as depicted in SEQ ID NO: 996, CDR-H2 as depicted in SEQ ID NO: 997, CDR-H3 as depicted in SEQ ID NO: 998, CDR-L1 as depicted in SEQ ID NO: 999, CDR-L2 as depicted in SEQ ID NO: 1000 and CDR-L3 as depicted in SEQ ID NO: 1001,
   [0035] CDR-H1 as depicted in SEQ ID NO: 1048, CDR-H2 as depicted in SEQ ID NO: 1049, CDR-H3 as depicted in SEQ ID NO: 1050, CDR-L1 as depicted in SEQ ID NO: 1051, CDR-L2 as depicted in SEQ ID NO: 1052 and CDR-L3 as depicted in SEQ ID NO: 1053, and
   [0036] CDR-H1 as depicted in SEQ ID NO: 1087, CDR-H2 as depicted in SEQ ID NO: 1088, CDR-H3 as depicted in SEQ ID NO: 1089, CDR-L1 as depicted in SEQ ID NO: 1090, CDR-L2 as depicted in SEQ ID NO: 1091 and CDR-L3 as depicted in SEQ ID NO: 1092;
[0037] (d) CDR-H1 as depicted in SEQ ID NO: 4, CDR-H2 as depicted in SEQ ID NO: 5, CDR-H3 as depicted in SEQ ID NO: 6, CDR-L1 as depicted in SEQ ID NO: 172, CDR-L2 as depicted in SEQ ID NO: 173 and CDR-L3 as depicted in SEQ ID NO: 174, CDR-H1 as depicted in SEQ ID NO: 10, CDR-H2 as depicted in SEQ ID NO: 11, CDR-H3 as depicted in SEQ ID NO: 12, CDR-L1 as depicted in SEQ ID NO: 178, CDR-L2 as depicted in SEQ ID NO: 179 and CDR-L3 as depicted in SEQ ID NO: 180, CDR-H1 as depicted in SEQ ID NO: 28, CDR-H2 as depicted in SEQ ID NO: 29, CDR-H3 as depicted in SEQ ID NO: 30, CDR-L1 as depicted in SEQ ID NO: 196, CDR-L2 as depicted in SEQ ID NO: 197 and CDR-L3 as depicted in SEQ ID NO: 198, CDR-H1 as depicted in SEQ ID NO: 34, CDR-H2 as depicted in SEQ ID NO: 35, CDR-H3 as depicted in SEQ ID NO: 36, CDR-L1 as depicted in SEQ ID NO: 202, CDR-L2 as depicted in SEQ ID NO: 203 and CDR-L3 as depicted in SEQ ID NO: 204, CDR-H1 as depicted in SEQ ID NO: 46, CDR-H2 as depicted in SEQ ID NO: 47, CDR-H3 as depicted in SEQ ID NO: 48, CDR-L1 as depicted in SEQ ID NO: 214, CDR-L2 as depicted in SEQ ID NO: 215 and CDR-L3 as depicted in SEQ ID NO: 216, CDR-H1 as depicted in SEQ ID NO: 58, CDR-H2 as depicted in SEQ ID NO: 59, CDR-H3 as depicted in SEQ ID NO: 60, CDR-L1 as depicted in SEQ ID NO: 226, CDR-L2 as depicted in SEQ ID NO: 227 and CDR-L3 as depicted in SEQ ID NO: 228, CDR-H1 as depicted in SEQ ID NO: 64, CDR-H2 as depicted in SEQ ID NO: 65, CDR-H3 as depicted in SEQ ID NO: 66, CDR-L1 as depicted in SEQ ID NO: 232, CDR-L2 as depicted in SEQ ID NO: 233 and CDR-L3 as depicted in SEQ ID NO: 234, CDR-H1 as depicted in SEQ ID NO: 70, CDR-H2 as depicted in SEQ ID NO: 71, CDR-H3 as depicted in SEQ ID NO: 72, CDR-L1 as depicted in SEQ ID NO: 238, CDR-L2 as depicted in SEQ ID NO: 239 and CDR-L3 as depicted in SEQ ID NO: 240, CDR-H1 as depicted in SEQ ID NO: 160, CDR-H2 as depicted in SEQ ID NO: 161, CDR-H3 as depicted in SEQ ID NO: 162, CDR-L1 as depicted in SEQ ID NO: 328, CDR-L2 as depicted in SEQ ID NO: 329 and CDR-L3 as depicted in SEQ ID NO: 330, CDR-H1 as depicted in SEQ ID NO: 46, CDR-H2 as depicted in SEQ ID NO: 47, CDR-H3 as depicted in SEQ ID NO: 48, CDR-L1 as depicted in SEQ ID NO: 924, CDR-L2 as depicted in SEQ ID NO: 215 and CDR-L3 as depicted in SEQ ID NO: 216, CDR-H1 as depicted in SEQ ID NO: 46, CDR-H2 as depicted in SEQ ID NO: 47, CDR-H3 as depicted in SEQ ID NO: 902, CDR-L1 as depicted in SEQ ID NO: 924, CDR-L2 as depicted in SEQ ID NO: 215 and CDR-L3 as depicted in SEQ ID NO: 216, CDR-H1 as depicted in SEQ ID NO: 46, CDR-H2 as depicted in SEQ ID NO: 47, CDR-H3 as depicted in SEQ ID NO: 903, CDR-L1 as depicted in SEQ ID NO: 924, CDR-L2 as depicted in SEQ ID NO: 215 and CDR-L3 as depicted in SEQ ID NO: 216, CDR-H1 as depicted in SEQ ID NO: 46, CDR-H2 as depicted in SEQ ID NO: 47, CDR-H3 as depicted in SEQ ID NO: 48, CDR-L1 as depicted in SEQ ID NO: 925, CDR-L2 as depicted in SEQ ID NO: 215 and CDR-L3 as depicted in SEQ ID NO: 216, CDR-H1 as depicted in SEQ ID NO: 70, CDR-H2 as depicted in SEQ ID NO: 907, CDR-H3 as depicted in SEQ ID NO: 72, CDR-L1 as depicted in SEQ ID NO: 238, CDR-L2 as depicted in SEQ ID NO: 239 and CDR-L3 as depicted in SEQ ID NO: 240, CDR-H1 as depicted in SEQ ID NO: 70, CDR-H2 as depicted in SEQ ID NO: 907, CDR-H3 as depicted in SEQ ID NO: 908, CDR-L1 as depicted in SEQ ID NO: 238, CDR-L2 as depicted in SEQ ID NO: 239 and CDR-L3 as depicted in SEQ ID NO: 240, CDR-H1 as depicted in SEQ ID NO: 28, CDR-H2 as depicted in SEQ ID NO: 901, CDR-H3 as depicted in SEQ ID NO: 30, CDR-L1 as depicted in SEQ ID NO: 922, CDR-L2 as depicted in SEQ ID NO: 197 and CDR-L3 as depicted in SEQ ID NO: 923, CDR-H1 as depicted in SEQ ID NO: 58, CDR-H2 as depicted in SEQ ID NO: 905, CDR-H3 as depicted in SEQ ID NO: 906, CDR-L1 as depicted in SEQ ID NO: 226, CDR-L2 as depicted in SEQ ID NO: 227 and CDR-L3 as depicted in SEQ ID NO: 228, CDR-H1 as depicted in SEQ ID NO: 58, CDR-H2 as depicted in SEQ ID NO: 905, CDR-H3 as depicted in SEQ ID NO: 60, CDR-L1 as depicted in SEQ ID NO: 226, CDR-L2 as depicted in SEQ ID NO: 227 and CDR-L3 as depicted in SEQ ID NO: 228, CDR-H1 as depicted in SEQ ID NO: 160, CDR-H2 as depicted in SEQ ID NO: 161, CDR-H3 as depicted in SEQ ID NO: 162, CDR-L1 as depicted in SEQ ID NO: 939, CDR-L2 as depicted in SEQ ID NO: 329 and CDR-L3 as depicted in SEQ ID NO: 330, CDR-H1 as depicted in SEQ ID NO: 160, CDR-H2 as depicted in SEQ ID NO: 921, CDR-H3 as depicted in SEQ ID NO: 162, CDR-L1 as depicted in SEQ ID NO: 939, CDR-L2 as depicted in SEQ ID NO: 329 and CDR-L3 as depicted in SEQ ID NO: 940, CDR-H1 as depicted in SEQ ID NO: 160, CDR-H2 as depicted in SEQ ID NO: 161, CDR-H3 as depicted in SEQ ID NO: 162, CDR-L1 as depicted in SEQ ID NO: 941, CDR-L2 as depicted in SEQ ID NO: 329 and CDR-L3 as depicted in SEQ ID NO: 330, CDR-H1 as depicted in SEQ ID NO: 28, CDR-H2 as depicted in SEQ ID NO: 29, CDR-H3 as depicted in SEQ ID NO: 30, CDR-L1 as depicted in SEQ ID NO: 196, CDR-L2 as depicted in SEQ ID NO: 197 and CDR-L3 as depicted in SEQ ID NO: 923, CDR-H1 as depicted in SEQ ID NO: 28, CDR-H2 as depicted in SEQ ID NO: 29, CDR-H3 as depicted in SEQ ID NO: 30, CDR-L1 as depicted in SEQ ID NO: 922, CDR-L2 as depicted in SEQ ID NO: 197 and CDR-L3 as depicted in SEQ ID NO: 923, CDR-H1 as depicted in SEQ ID NO: 28, CDR-H2 as depicted in SEQ ID NO: 901, CDR-H3 as depicted in SEQ ID NO: 30, CDR-L1 as depicted in SEQ ID NO: 922, CDR-L2 as depicted in SEQ ID NO: 197 and CDR-L3 as depicted in SEQ ID NO: 923, CDR-H1 as depicted in SEQ ID NO: 28, CDR-H2 as depicted in SEQ ID NO: 29, CDR-H3 as depicted in SEQ ID NO: 30, CDR-L1 as depicted in SEQ ID NO: 939, CDR-L2 as depicted in SEQ ID NO: 329 and CDR-L3 as depicted in SEQ ID NO: 330,
   [0038] CDR-H1 as depicted in SEQ ID NO: 970, CDR-H2 as depicted in SEQ ID NO: 971, CDR-H3 as depicted in SEQ ID NO: 972, CDR-L1 as depicted in SEQ ID NO: 973, CDR-L2 as depicted in SEQ ID NO: 974 and CDR-L3 as depicted in SEQ ID NO: 975, CDR-H1 as depicted in SEQ ID NO: 1061, CDR-H2 as depicted in SEQ ID NO: 1062, CDR-H3 as depicted in SEQ ID NO: 1063, CDR-L1 as depicted in SEQ ID NO: 1064, CDR-L2 as depicted in SEQ ID NO: 1065 and CDR-L3 as depicted in SEQ ID NO: 1066,
   [0039] CDR-H1 as depicted in SEQ ID NO: 1139, CDR-H2 as depicted in SEQ ID NO: 1140, CDR-H3 as depicted in SEQ ID NO: 1141, CDR-L1 as depicted in SEQ ID NO: 1142, CDR-L2 as depicted in SEQ ID NO: 1143 and CDR-L3 as depicted in SEQ ID NO: 1144,
   [0040] CDR-H1 as depicted in SEQ ID NO: 1152, CDR-H2 as depicted in SEQ ID NO: 1153, CDR-H3 as depicted in SEQ ID NO: 1154, CDR-L1 as depicted in SEQ ID NO: 1155, CDR-L2 as depicted in SEQ ID NO: 1156 and CDR-L3 as depicted in SEQ ID NO: 1157,
   [0041] CDR-H1 as depicted in SEQ ID NO: 1178, CDR-H2 as depicted in SEQ ID NO: 1179, CDR-H3 as depicted in SEQ ID NO: 1180, CDR-L1 as depicted in SEQ ID NO: 1181, CDR-L2 as depicted in SEQ ID NO: 1182 and CDR-L3 as depicted in SEQ ID NO: 1183,
   [0042] CDR-H1 as depicted in SEQ ID NO: 1191, CDR-H2 as depicted in SEQ ID NO: 1192, CDR-H3 as depicted in SEQ ID NO: 1193, CDR-L1 as depicted in SEQ ID NO: 1194, CDR-L2 as depicted in SEQ ID NO: 1195 and CDR-L3 as depicted in SEQ ID NO: 1196,
   [0043] CDR-H1 as depicted in SEQ ID NO: 1204, CDR-H2 as depicted in SEQ ID NO: 1205, CDR-H3 as depicted in SEQ ID NO: 1206, CDR-L1 as depicted in SEQ ID NO: 1207, CDR-L2 as depicted in SEQ ID NO: 1208 and CDR-L3 as depicted in SEQ ID NO: 1209,
   [0044] CDR-H1 as depicted in SEQ ID NO: 1217, CDR-H2 as depicted in SEQ ID NO: 1218, CDR-H3 as depicted in SEQ ID NO: 1219, CDR-L1 as depicted in SEQ ID NO: 1220, CDR-L2 as depicted in SEQ ID NO: 1221 and CDR-L3 as depicted in SEQ ID NO: 1222,
   [0045] CDR-H1 as depicted in SEQ ID NO: 1230, CDR-H2 as depicted in SEQ ID NO: 1231, CDR-H3 as depicted in SEQ ID NO: 1232, CDR-L1 as depicted in SEQ ID NO: 1233, CDR-L2 as depicted in SEQ ID NO: 1234 and CDR-L3 as depicted in SEQ ID NO: 1235,
   [0046] CDR-H1 as depicted in SEQ ID NO: 1308, CDR-H2 as depicted in SEQ ID NO: 1309, CDR-H3 as depicted in SEQ ID NO: 1310, CDR-L1 as depicted in SEQ ID NO: 1311, CDR-L2 as depicted in SEQ ID NO: 1312 and CDR-L3 as depicted in SEQ ID NO: 1313,
   [0047] CDR-H1 as depicted in SEQ ID NO: 1321, CDR-H2 as depicted in SEQ ID NO: 1322, CDR-H3 as depicted in SEQ ID NO: 1323, CDR-L1 as depicted in SEQ ID NO: 1324, CDR-L2 as depicted in SEQ ID NO: 1325 and CDR-L3 as depicted in SEQ ID NO: 1326,
   [0048] CDR-H1 as depicted in SEQ ID NO: 1373, CDR-H2 as depicted in SEQ ID NO: 1374, CDR-H3 as depicted in SEQ ID NO: 1375, CDR-L1 as depicted in SEQ ID NO: 1376, CDR-L2 as depicted in SEQ ID NO: 1377 and CDR-L3 as depicted in SEQ ID NO: 1378,
   [0049] CDR-H1 as depicted in SEQ ID NO: 1386, CDR-H2 as depicted in SEQ ID NO: 1387, CDR-H3 as depicted in SEQ ID NO: 1388, CDR-L1 as depicted in SEQ ID NO: 1389, CDR-L2 as depicted in SEQ ID NO: 1390 and CDR-L3 as depicted in SEQ ID NO: 1391,
   [0050] CDR-H1 as depicted in SEQ ID NO: 1399, CDR-H2 as depicted in SEQ ID NO: 1400, CDR-H3 as depicted in SEQ ID NO: 1401, CDR-L1 as depicted in SEQ ID NO: 1402, CDR-L2 as depicted in SEQ ID NO: 1403 and CDR-L3 as depicted in SEQ ID NO: 1404,
   [0051] CDR-H1 as depicted in SEQ ID NO: 1412, CDR-H2 as depicted in SEQ ID NO: 1413, CDR-H3 as depicted in SEQ ID NO: 1414, CDR-L1 as depicted in SEQ ID NO: 1415, CDR-L2 as depicted in SEQ ID NO: 1416 and CDR-L3 as depicted in SEQ ID NO: 1417; and
[0052] (e) CDR-H1 as depicted in SEQ ID NO: 76, CDR-H2 as depicted in SEQ ID NO: 77, CDR-H3 as depicted in SEQ ID NO: 78, CDR-L1 as depicted in SEQ ID NO: 244, CDR-L2 as depicted in SEQ ID NO: 245 and CDR-L3 as depicted in SEQ ID NO: 246, CDR-H1 as depicted in SEQ ID NO: 88, CDR-H2 as depicted in SEQ ID NO: 89, CDR-H3 as depicted in SEQ ID NO: 90, CDR-L1 as depicted in SEQ ID NO: 256, CDR-L2 as depicted in SEQ ID NO: 257 and CDR-L3 as depicted in SEQ ID NO: 258, CDR-H1 as depicted in SEQ ID NO: 106, CDR-H2 as depicted in SEQ ID NO: 107, CDR-H3 as depicted in SEQ ID NO: 108, CDR-L1 as depicted in SEQ ID NO: 274, CDR-L2 as depicted in SEQ ID NO: 275 and CDR-L3 as depicted in SEQ ID NO: 276, CDR-H1 as depicted in SEQ ID NO: 112, CDR-H2 as depicted in SEQ ID NO: 113, CDR-H3 as depicted in SEQ ID NO: 114, CDR-L1 as depicted in SEQ ID NO: 280, CDR-L2 as depicted in SEQ ID NO: 281 and CDR-L3 as depicted in SEQ ID NO: 282, CDR-H1 as depicted in SEQ ID NO: 106, CDR-H2 as depicted in SEQ ID NO: 107, CDR-H3 as depicted in SEQ ID NO: 108, CDR-L1 as depicted in SEQ ID NO: 274, CDR-L2 as depicted in SEQ ID NO: 275 and CDR-L3 as depicted in SEQ ID NO: 276, and
   [0053] CDR-H1 as depicted in SEQ ID NO: 983, CDR-H2 as depicted in SEQ ID NO: 984, CDR-H3 as depicted in SEQ ID NO: 985, CDR-L1 as depicted in SEQ ID NO: 986, CDR-L2 as depicted in SEQ ID NO: 987 and CDR-L3 as depicted in SEQ ID NO: 988.

[0054] In a further embodiment of the antibody construct of the invention the first binding domain comprises a VH region selected from the group consisting of VH regions
[0055] (a) as depicted in SEQ ID NO: 362, SEQ ID NO: 364, SEQ ID NO: 485, SEQ ID NO: 486, SEQ ID NO: 487, SEQ ID NO: 492, SEQ ID NO: 493, SEQ ID NO: 494, SEQ ID NO: 495, SEQ ID NO: 1133, SEQ ID NO: 1172, SEQ ID NO: 1341, SEQ ID NO: 1354, SEQ ID NO: 1367, SEQ ID NO: 1432, and SEQ ID NO: 1445;
[0056] (b) as depicted in SEQ ID NO: 342, SEQ ID NO: 366, SEQ ID NO: 370, SEQ ID NO: 344, SEQ ID NO: 372, SEQ ID NO: 368, SEQ ID NO: 496, SEQ ID NO: 497, SEQ ID NO: 498, SEQ ID NO: 499, SEQ ID NO: 500, SEQ ID NO: 508, SEQ ID NO: 509, SEQ ID NO: 510, SEQ ID NO: 511, SEQ ID NO: 512, SEQ ID NO: 519, SEQ ID NO: 520, SEQ ID NO: 521, SEQ ID NO: 522, SEQ ID NO: 523, SEQ ID NO: 524, SEQ ID NO: 525, SEQ ID NO: 526, SEQ ID NO: 527, SEQ ID NO: 528, SEQ ID NO: 529, SEQ ID NO: 530, SEQ ID NO: 531, SEQ ID NO: 532, SEQ ID NO: 533, SEQ ID NO: 534, SEQ ID NO: 535, SEQ ID NO: 536, SEQ ID NO: 537, SEQ ID NO: 538, SEQ ID NO: 1016, SEQ ID NO: 1029, SEQ ID NO: 1042, SEQ ID NO: 1081, SEQ ID NO: 1107, SEQ ID NO: 1120, SEQ ID NO: 1250, SEQ ID NO: 1263, SEQ ID NO: 1276, SEQ ID NO: 1289, and SEQ ID NO: 1302;
[0057] (c) as depicted in SEQ ID NO: 338, SEQ ID NO: 354, SEQ ID NO: 378, SEQ ID NO: 356, SEQ ID NO: 476, SEQ ID NO: 477, SEQ ID NO: 478, SEQ ID NO: 479, SEQ ID NO: 480, SEQ ID NO: 481, SEQ ID NO: 482, SEQ ID NO: 483, SEQ ID NO: 484, SEQ ID NO: 501, SEQ ID NO: 502, SEQ ID NO: 503, SEQ ID NO: 504, SEQ ID NO: 505, SEQ ID NO: 506, SEQ ID NO: 517, SEQ ID NO: 518, SEQ ID NO: 1003, SEQ ID NO: 1055, and SEQ ID NO: 1094;
[0058] (d) as depicted in SEQ ID NO: 352, SEQ ID NO: 360, SEQ ID NO: 388, SEQ ID NO: 386, SEQ ID NO: 340, SEQ ID NO: 346, SEQ ID NO: 374, SEQ ID NO: 348, SEQ ID NO: 390, SEQ ID NO: 463, SEQ ID NO: 464, SEQ ID NO: 465, SEQ ID NO: 466, SEQ ID NO: 467, SEQ ID NO: 468, SEQ ID NO: 469, SEQ ID NO: 470, SEQ ID NO: 471, SEQ ID NO: 472, SEQ ID NO: 473, SEQ ID NO: 474, SEQ ID NO: 475, SEQ ID NO: 488, SEQ ID NO: 489, SEQ ID NO: 490, SEQ ID NO: 491, SEQ ID NO: 513, SEQ ID NO: 514, SEQ ID NO: 515, SEQ ID NO: 516, SEQ ID NO: 540, SEQ ID NO: 541, SEQ ID NO: 542, SEQ ID NO: 543, SEQ ID NO: 977, SEQ ID NO: 1068, SEQ ID NO: 1146, SEQ ID NO: 1159, SEQ ID NO: 1185, SEQ ID NO: 1198, SEQ ID NO: 1211, SEQ ID NO: 1224, SEQ ID NO: 1237, SEQ ID NO: 1315, SEQ ID NO: 1328, SEQ ID NO: 1380, SEQ ID NO: 1393, SEQ ID NO: 1406, and SEQ ID NO: 1419; and
[0059] (e) as depicted in SEQ ID NO: 376, SEQ ID NO: 392, SEQ ID NO: 358, SEQ ID NO: 350, SEQ ID NO: 507, and SEQ ID NO: 990.

[0060] In another embodiment of the antibody construct of the invention the first binding domain comprises a VL region selected from the group consisting of VL regions
[0061] (a) as depicted in SEQ ID NO: 418, SEQ ID NO: 420, SEQ ID NO: 580, SEQ ID NO: 581, SEQ ID NO: 582, SEQ ID NO: 587, SEQ ID NO: 588, SEQ ID NO: 589, SEQ ID NO: 590, SEQ ID NO: 1135, SEQ ID NO: 1174, SEQ ID NO: 1343, SEQ ID NO: 1356, SEQ ID NO: 1369, SEQ ID NO: 1434, and SEQ ID NO: 1447;
[0062] (b) as depicted in SEQ ID NO: 398, SEQ ID NO: 422, SEQ ID NO: 426, SEQ ID NO: 400, SEQ ID NO: 428, SEQ ID NO: 424, SEQ ID NO: 591, SEQ ID NO: 592, SEQ ID NO: 593, SEQ ID NO: 594, SEQ ID NO: 595, SEQ ID NO: 603, SEQ ID NO: 604, SEQ ID NO: 605, SEQ ID NO: 606, SEQ ID NO: 607, SEQ ID NO: 614, SEQ ID NO: 615, SEQ ID NO: 616, SEQ ID NO: 617, SEQ ID NO: 618, SEQ ID NO: 619, SEQ ID NO: 620, SEQ ID NO: 621, SEQ ID NO: 622, SEQ ID NO: 623, SEQ ID NO: 624, SEQ ID NO: 625, SEQ ID NO: 626, SEQ ID NO: 627, SEQ ID NO: 628, SEQ ID NO: 629, SEQ ID NO: 630, SEQ ID NO: 631, SEQ ID NO: 632, SEQ ID NO: 633, SEQ ID NO: 1018, SEQ ID NO: 1031, SEQ ID NO: 1044, SEQ ID NO: 1083, SEQ ID NO: 1109, SEQ ID NO: 1122, SEQ ID NO: 1252, SEQ ID NO: 1265, SEQ ID NO: 1278, SEQ ID NO: 1291, and SEQ ID NO: 1304;
[0063] (c) as depicted in SEQ ID NO: 394, SEQ ID NO: 410, SEQ ID NO: 434, SEQ ID NO: 412, SEQ ID NO: 571, SEQ ID NO: 572, SEQ ID NO: 573, SEQ ID NO: 574, SEQ ID NO: 575, SEQ ID NO: 576, SEQ ID NO: 577, SEQ ID NO: 578, SEQ ID NO: 579, SEQ ID NO: 596, SEQ ID NO: 597, SEQ ID NO: 598, SEQ ID NO: 599, SEQ ID NO: 600, SEQ ID NO: 601, SEQ ID NO: 612, SEQ ID NO: 613, SEQ ID NO: 1005, SEQ ID NO: 1057, and SEQ ID NO: 1096;
[0064] (d) as depicted in SEQ ID NO: 408, SEQ ID NO: 416, SEQ ID NO: 444, SEQ ID NO: 442, SEQ ID NO: 396, SEQ ID NO: 402, SEQ ID NO: 430, SEQ ID NO: 404, SEQ ID NO: 446, SEQ ID NO: 558, SEQ ID NO: 559, SEQ ID NO: 560, SEQ ID NO: 561, SEQ ID NO: 562, SEQ ID NO: 563, SEQ ID NO: 564, SEQ ID NO: 565, SEQ ID NO: 566, SEQ ID NO: 567, SEQ ID NO: 568, SEQ ID NO: 569, SEQ ID NO: 570, SEQ ID NO: 583, SEQ ID NO: 584, SEQ ID NO: 585, SEQ ID NO: 586, SEQ ID NO: 608, SEQ ID NO: 609, SEQ ID NO: 610, SEQ ID NO: 611, SEQ ID NO: 635, SEQ ID NO: 636, SEQ ID NO: 637, SEQ ID NO: 638, SEQ ID NO: 979, SEQ ID NO: 1070, SEQ ID NO: 1148, SEQ ID NO: 1161, SEQ ID NO: 1187, SEQ ID NO: 1200, SEQ ID NO: 1213, SEQ ID NO: 1226, SEQ ID NO: 1239, SEQ ID NO: 1317, SEQ ID NO: 1330, SEQ ID NO: 1382, SEQ ID NO: 1395, SEQ ID NO: 1408, and SEQ ID NO: 1421; and
[0065] (e) as depicted in SEQ ID NO: 432, SEQ ID NO: 448, SEQ ID NO: 414, SEQ ID NO: 406, SEQ ID NO: 602, and SEQ ID NO: 992.

[0066] The invention further provides an embodiment of the antibody construct of the invention, wherein the first binding domain comprises a VH region and a VL region selected from the group consisting of:
[0067] (1) pairs of a VH region and a VL region as depicted in SEQ ID NOs: 362+418, SEQ ID NOs: 364+420, SEQ ID NOs: 485+580, SEQ ID NOs: 486+581, SEQ ID NOs: 487+582, SEQ ID NOs: 492+587, SEQ ID NOs: 493+588, SEQ ID NOs: 494+589, SEQ ID NOs: 495+590, SEQ ID NOs: 1133+1135, SEQ ID NOs: 1172+1174, SEQ ID NOs: 1341+1343, SEQ ID NOs: 1354+1356, SEQ ID NOs: 1367+1369, SEQ ID NOs: 1432+1434, and SEQ ID NOs: 1445+1447;
[0068] (2) pairs of a VH region and a VL region as depicted in SEQ ID NOs: 342+398, SEQ ID NOs: 366+422, SEQ ID NOs: 370+426, SEQ ID NOs: 344+400, SEQ ID NOs: 372+428, SEQ ID NOs: 368+424, SEQ ID NOs: 496+591, SEQ ID NOs: 497+592, SEQ ID NOs: 498+593, SEQ ID NOs: 499+594, SEQ ID NOs: 500+595, SEQ ID NOs: 508+603, SEQ ID NOs: 509+604, SEQ ID NOs: 510+605, SEQ ID NOs: 511+606, SEQ ID NOs: 512+607, SEQ ID NOs: 519+614, SEQ ID NOs: 520+615, SEQ ID NOs: 521+616, SEQ ID NOs: 522+617, SEQ ID NOs: 523+618, SEQ ID NOs: 524+619, SEQ ID NOs: 525+620, SEQ ID NOs: 526+621, SEQ ID NOs: 527+622, SEQ ID NOs: 528+623, SEQ ID NOs: 529+624, SEQ ID NOs: 530+625, SEQ ID NOs: 531+626, SEQ ID NOs: 532+627, SEQ ID NOs: 533+628, SEQ ID NOs: 534+629, SEQ ID NOs: 535+630, SEQ ID NOs: 536+631, SEQ ID NOs: 537+632, SEQ ID NOs: 538+633, SEQ ID NOs: 1016+1018, SEQ ID NOs: 1029+1031, SEQ ID NOs: 1042+1044, SEQ ID NOs: 1081+1083, SEQ ID NOs: 1107+1109, SEQ ID NOs: 1120+1122, SEQ ID NOs: 1250+1252, SEQ ID NOs: 1263+1265, SEQ ID NOs: 1276+1278, SEQ ID NOs: 1289+1291, and SEQ ID NOs: 1302+1304;
[0069] (3) pairs of a VH region and a VL region as depicted in SEQ ID NOs: 338+394, SEQ ID NOs: 354+410, SEQ ID NOs: 378+434, SEQ ID NOs: 356+412, SEQ ID NOs: 476+571, SEQ ID NOs: 477+572, SEQ ID NOs: 478+573, SEQ ID NOs: 479+574, SEQ ID NOs: 480+575, SEQ ID NOs: 481+576, SEQ ID NOs: 482+577, SEQ ID NOs: 483+578, SEQ ID NOs: 484+579, SEQ ID NOs: 501+596, SEQ ID NOs: 502+597, SEQ ID NOs: 503+598, SEQ ID NOs: 504+599, SEQ ID NOs: 505+600, SEQ ID NOs: 506+601, SEQ ID NOs: 517+612, SEQ ID NOs: 518+613, SEQ ID NOs: 1003+1005, SEQ ID NOs: 1055+1057, and SEQ ID NOs: 1094+1096;
[0070] (4) pairs of a VH region and a VL region as depicted in SEQ ID NOs: 352+408, SEQ ID NOs: 360+416, SEQ ID NOs: 388+444, SEQ ID NOs: 386+442, SEQ ID NOs: 340+396, SEQ ID NOs: 346+402, SEQ ID NOs: 374+430, SEQ ID NOs: 348+404, SEQ ID NOs: 390+446, SEQ ID NOs: 463+558, SEQ ID NOs: 464+559, SEQ ID NOs: 465+560, SEQ ID NOs: 466+561, SEQ ID NOs: 467+562, SEQ ID NOs: 468+563, SEQ ID NOs: 469+564, SEQ ID NOs: 470+565, SEQ ID NOs: 471+566, SEQ ID NOs: 472+567, SEQ ID NOs: 473+568, SEQ ID NOs: 474+569, SEQ ID NOs: 475+570, SEQ ID NOs: 488+583, SEQ ID NOs: 489+584, SEQ ID NOs: 490+585, SEQ ID NOs: 491+586, SEQ ID NOs: 513+608, SEQ ID NOs: 514+609, SEQ ID NOs: 515+610, SEQ ID NOs: 516+611, SEQ ID NOs: 540+635, SEQ ID NOs: 541+636, SEQ ID NOs: 542+637, SEQ ID NOs: 543+638, SEQ ID NOs: 977+979, SEQ ID NOs: 1068+1070, SEQ ID NOs: 1146+1148, SEQ ID NOs: 1159+1161, SEQ ID NOs: 1185+1187, SEQ ID NOs: 1198+1200, SEQ ID NOs: 1211+1213, SEQ ID NOs: 1224+1226, SEQ ID NOs: 1237+1239, SEQ ID NOs: 1315+1317, SEQ ID NOs: 1328+1330, SEQ ID NOs: 1380, +1382 SEQ ID NOs: 1393+1395, SEQ ID NOs: 1406+1408, and SEQ ID NOs: 1419+1421; and
[0071] (5) pairs of a VH region and a VL region as depicted in SEQ ID NOs: 376+432, SEQ ID NOs: 392+448, SEQ ID NOs: 358+414, SEQ ID NOs: 350+406, SEQ ID NOs: 507+602, and SEQ ID NOs: 990+992.

[0072] In a further embodiment of the invention the antibody construct is in a format selected from the group consisting of (scFv)₂, (single domain mAb)₂, scFv-single domain mAb, diabodies and oligomers thereof.

[0073] In a preferred embodiment the first binding domain comprises an amino acid sequence selected from the group consisting of
[0074] (a) as depicted in SEQ ID NO: 117, SEQ ID NO: 1137, SEQ ID NO: 1176, SEQ ID NO: 1345, SEQ ID NO: 1358, SEQ ID NO: 1371, SEQ ID NO: 1436, and SEQ ID NO: 1449;
[0075] (b) as depicted in SEQ ID NO: 1020, SEQ ID NO: 1033, SEQ ID NO: 1046, SEQ ID NO: 1085, SEQ ID NO: 1111, SEQ ID NO: 1124, SEQ ID NO: 1254, SEQ ID NO: 1267, SEQ ID NO: 1280, SEQ ID NO: 1293, and SEQ ID NO: 1306;
[0076] (c) as depicted in SEQ ID NO: 1007, SEQ ID NO: 1059, and SEQ ID NO: 1098;
[0077] (d) as depicted in SEQ ID NO: 981, SEQ ID NO: 1072, SEQ ID NO: 1150, SEQ ID NO: 1163, SEQ ID NO: 1189, SEQ ID NO: 1202, SEQ ID NO: 1215, SEQ ID NO: 1228, SEQ ID NO: 1241, SEQ ID NO: 1319, SEQ ID NO: 1332, SEQ ID NO: 1384, SEQ ID NO: 1397, SEQ ID NO: 1410, and SEQ ID NO: 1423; and
[0078] (e) as depicted in SEQ ID NO: 994.

[0079] In another embodiment of the antibody construct of the invention the second binding domain is capable of binding to human and Callithrix jacchus, Saguinus oedipus or Saimiri sciureus CD3 epsilon.

[0080] In a preferred embodiment the antibody construct of the invention has an amino acid sequence selected from the group consisting of
[0081] (a) as depicted in SEQ ID NO: 1138, SEQ ID NO: 1177, SEQ ID NO: 1346, SEQ ID NO: 1359, SEQ ID NO: 1372, SEQ ID NO: 1437, and SEQ ID NO: 1450;
[0082] (b) as depicted in SEQ ID NO: 1021, SEQ ID NO: 1034, SEQ ID NO: 1047, SEQ ID NO: 1086, SEQ ID NO: 1112, SEQ ID NO: 1125, SEQ ID NO: 1255, SEQ ID NO: 1268, SEQ ID NO: 1281, SEQ ID NO: 1294, and SEQ ID NO: 1307;
[0083] (c) as depicted in SEQ ID NO: 1008, SEQ ID NO: 1060, and SEQ ID NO: 1099;
[0084] (d) as depicted in SEQ ID NO: 982, SEQ ID NO: 1073, SEQ ID NO: 1151, SEQ ID NO: 1164, SEQ ID NO: 1190, SEQ ID NO: 1203, SEQ ID NO: 1216, SEQ ID NO: 1229, SEQ ID NO: 1242, SEQ ID NO: 1320, SEQ ID NO: 1333, SEQ ID NO: 1385, SEQ ID NO: 1398, SEQ ID NO: 1411, and SEQ ID NO: 1424; and
[0085] (e) as depicted in SEQ ID NO: 995.

[0086] The invention further provides a nucleic acid sequence encoding an antibody construct of the invention.

[0087] Furthermore, the invention provides a vector comprising a nucleic acid sequence of the invention. Moreover, the invention provides a host cell transformed or transfected with the nucleic acid sequence of the invention.

[0088] In a further embodiment the invention provides a process for the production of a antibody construct of the invention, said process comprising culturing a host cell of the invention under conditions allowing the expression of the antibody construct of the invention and recovering the produced antibody construct from the culture.

[0089] Moreover, the invention provides a pharmaceutical composition comprising an antibody construct of the invention or produced according to the process of the invention

[0090] In one embodiment the invention provides the antibody construct of the invention or produced according to the process of the invention for use in the prevention, treatment or amelioration of a melanoma disease or metastatic melanoma disease.

[0091] The invention also provides a method for the treatment or amelioration of a melanoma disease or metastatic melanoma disease, comprising the step of administering to a subject in need thereof the antibody construct of the invention or produced according to the process of the invention.

[0092] In a preferred embodiment method of use of the invention the melanoma disease or metastatic melanoma disease is selected from the group consisting of superficial spreading melanoma, lentigo maligna, lentigo maligna melanoma, acral lentiginous melanoma and nodular melanoma.

[0093] In a further embodiment, the invention provides a kit comprising an antibody construct of the invention, or produced according to the process of the invention, a vector of the invention, and/or a host cell of the invention.

### BRIEF DESCRIPTION OF THE DRAWINGS

[0094] The patent or application file contains at least one drawing executed in color. Copies of this patent or patent application publication with color drawing(s) will be provided by the Office upon request and payment of the necessary fee.

[0095] FIG. 1:

[0096] FIG. 1 depicts cell viability data of Colo-699 cells that have been treated with fully human anti-CDH19 antibodies and a high concentration of a goat anti-human Fc monovalent Fab conjugated with DM1 (DM1-Fab) at a drug-antibody ratio (DAR) (˜1.3).

[0097] FIG. 2:

[0098] FIG. 2 depicts the average cell viability data from a CHL-1 assay plotted against the average cell viability data from the Colo-699 assay.

[0099] FIG. 3:

[0100] FIG. 3 shows the relative expression of CDH19 mRNA in metastatic and primary melanoma samples.

[0101] FIG. 4:

[0102] FIG. 4 shows the expression of CDH19 protein in human tumor samples by IHC.

[0103] FIG. 5:

[0104] FIG. 5 shows the results of the analysis of tumor cell lines by flow cytometry and IHC to identify model systems with CDH19 expression similar to human tumors based on the number of CDH19 receptors present on the cell surface.

[0105] FIG. 6:

[0106] FACS analysis of CDH19/CD3 bispecific antibodies on indicated cell lines:

[0107] 1) untransfected L1.2. 2) L1.2 cells stably transfected with human CDH19, 3) melanoma cell line CHL-1, 4) melanoma cell line A2058, 5) human CD3 positive human T cell line HBP-ALL, 6) macaque T cell line 4119 LnPx. Negative controls [1) to 6)]: detection antibodies without prior CDH19/CD3 bispecific antibody.

[0108] FIG. 7:

[0109] Cytotoxic activity of CDH19/CD3 bispecific antibodies as measured in a 48-hour FACS-based cytotoxicity assay. Effector cells: unstimulated human PBMC. Target cells: as indicated. Effector to target cell (E:T)-ratio: 10:1.

[0110] FIG. 8:

[0111] Tumor growth in vivo inhibition of Colo699 cells by administration of CDH19 BiTE 2G6. The bispecific antibody construct inhibits growth of tumors at 0.5 mg/kg dose.

[0112] FIG. 9:

[0113] Tumor growth in vivo inhibition of CHL-1 cells by administration of CDH19 BiTE 2G6. The bispecific antibody construct inhibits growth of tumors at 0.5 mg/kg dose.

### DETAILED DESCRIPTION OF THE INVENTION

### Definitions

[0114] It must be noted that as used herein, the singular forms “a”, “an”, and “the”, include plural references unless the context clearly indicates otherwise. Thus, for example, reference to “a reagent” includes one or more of such different reagents and reference to “the method” includes reference to equivalent steps and methods known to those of ordinary skill in the art that could be modified or substituted for the methods described herein.

[0115] Unless otherwise indicated, the term “at least” preceding a series of elements is to be understood to refer to every element in the series. Those skilled in the art will recognize, or be able to ascertain using no more than routine experimentation, many equivalents to the specific embodiments of the invention described herein. Such equivalents are intended to be encompassed by the present invention.

[0116] The term “and/or” wherever used herein includes the meaning of “and”, “or” and “all or any other combination of the elements connected by said term”.

[0117] The term “about” or “approximately” as used herein means within ±20%, preferably within ±15%, more preferably within ±10%, and most preferably within ±5% of a given value or range.

[0118] Throughout this specification and the claims which follow, unless the context requires otherwise, the word “comprise”, and variations such as “comprises” and “comprising”, will be understood to imply the inclusion of a stated integer or step or group of integers or steps but not the exclusion of any other integer or step or group of integer or step. When used herein the term “comprising” can be substituted with the term “containing” or “including” or sometimes when used herein with the term “having”.

[0119] When used herein “consisting of” excludes any element, step, or ingredient not specified in the claim element. When used herein, “consisting essentially of” does not exclude materials or steps that do not materially affect the basic and novel characteristics of the claim.

[0120] In each instance herein any of the terms “comprising”, “consisting essentially of” and “consisting of” may be replaced with either of the other two terms.

[0121] The definition of the term “antibody” includes embodiments such as monoclonal, chimeric, single chain, humanized and human antibodies, as well as antibody fragments, like, inter alia, Fab fragments. Antibody fragments or derivatives further comprise F(ab′)₂, Fv, scFv fragments or single domain antibodies such as domain antibodies or nanobodies, single variable domain antibodies or immunoglobulin single variable domain comprising merely one variable domain, which might be VHH, VH or VL, that specifically bind an antigen or epitope independently of other V regions or domains; see, for example, Harlow and Lane (1988) and (1999), loc. cit.; Kontermann and Dübel, Antibody Engineering, Springer, 2nd ed. 2010 and Little, Recombinant Antibodies for Immunotherapy, Cambridge University Press 2009. Such immunoglobulin single variable domain encompasses not only an isolated antibody single variable domain polypeptide, but also larger polypeptides that comprise one or more monomers of an antibody single variable domain polypeptide sequence.

[0122] In line with this definition all above described embodiments of the term antibody can be subsumed under the term “antibody construct”. Said term also includes diabodies or Dual-Affinity Re-Targeting (DART) antibodies. Further envisaged are (bispecific) single chain diabodies, tandem diabodies (Tandab's), “minibodies” exemplified by a structure which is as follows: (VH-VL-CH3)₂, (scFv-CH3)₂ or (scFv-CH3-scFv)₂, “Fc DART” antibodies and “IgG DART” antibodies, and multibodies such as triabodies. Immunoglobulin single variable domains encompass not only an isolated antibody single variable domain polypeptide, but also larger polypeptides that comprise one or more monomers of an antibody single variable domain polypeptide sequence.

[0123] Various procedures are known in the art and may be used for the production of such antibody constructs (antibodies and/or fragments). Thus, (antibody) derivatives can be produced by peptidomimetics. Further, techniques described for the production of single chain antibodies (see, inter alia, U.S. Pat. No. 4,946,778, Kontermann and Dübel (2010), loc. cit. and Little (2009), loc. cit.) can be adapted to produce single chain antibodies specific for elected polypeptide(s). Also, transgenic animals may be used to express humanized antibodies specific for polypeptides and fusion proteins of this invention. For the preparation of monoclonal antibodies, any technique, providing antibodies produced by continuous cell line cultures can be used. Examples for such techniques include the hybridoma technique (Köhler and Milstein Nature 256 (1975), 495-497), the trioma technique, the human B-cell hybridoma technique (Kozbor, Immunology Today 4 (1983), 72) and the EBV-hybridoma technique to produce human monoclonal antibodies (Cole et al., Monoclonal Antibodies and Cancer Therapy, Alan R. Liss, Inc. (1985), 77-96). Surface plasmon resonance as employed in the BIAcore system can be used to increase the efficiency of phage antibodies which bind to an epitope of a target polypeptide, such as CD3 epsilon (Schier, Human Antibodies Hybridomas 7 (1996), 97-105; Malmborg, J. Immunol. Methods 183 (1995), 7-13). It is also envisaged in the context of this invention that the term “antibody” comprises antibody constructs, which may be expressed in a host as described herein below, e.g. antibody constructs which may be transfected and/or transduced via, inter alia, viruses or plasmid vectors.

[0124] Furthermore, the term “antibody” as employed in the invention also relates to derivatives or variants of the antibodies described herein which display the same specificity as the described antibodies.

[0125] The terms “antigen-binding domain”, “antigen-binding fragment” and “antibody binding region” when used herein refer to a part of an antibody molecule that comprises amino acids responsible for the specific binding between antibody and antigen. The part of the antigen that is specifically recognized and bound by the antibody is referred to as the “epitope” as described herein above. As mentioned above, an antigen-binding domain may typically comprise an antibody light chain variable region (VL) and an antibody heavy chain variable region (VH); however, it does not have to comprise both. Fd fragments, for example, have two VH regions and often retain some antigen-binding function of the intact antigen-binding domain. Examples of antigen-binding fragments of an antibody include (1) a Fab fragment, a monovalent fragment having the VL, VH, CL and CH1 domains; (2) a F(ab′)₂ fragment, a bivalent fragment having two Fab fragments linked by a disulfide bridge at the hinge region; (3) a Fd fragment having the two VH and CH1 domains; (4) a Fv fragment having the VL and VH domains of a single arm of an antibody, (5) a dAb fragment (Ward et al., (1989) Nature 341:544-546), which has a VH domain; (6) an isolated complementarity determining region (CDR), and (7) a single chain Fv (scFv). Although the two domains of the Fv fragment, VL and VH are coded for by separate genes, they can be joined, using recombinant methods, by a synthetic linker that enables them to be made as a single protein chain in which the VL and VH regions pair to form monovalent molecules (known as single chain Fv (scFv); see e.g., Huston et al. (1988) Proc. Natl. Acad. Sci USA 85:5879-5883). These antibody fragments are obtained using conventional techniques known to those with skill in the art, and the fragments are evaluated for function in the same manner as are intact antibodies.

[0126] The term “monoclonal antibody” as used herein refers to an antibody obtained from a population of substantially homogeneous antibodies, i.e., the individual antibodies comprising the population are identical except for possible naturally occurring mutations and/or post-translation modifications (e.g., isomerizations, amidations) that may be present in minor amounts. Monoclonal antibodies are highly specific, being directed against a single antigenic site. Furthermore, in contrast to conventional (polyclonal) antibody preparations which typically include different antibodies directed against different determinants (epitopes), each monoclonal antibody is directed against a single determinant on the antigen. In addition to their specificity, the monoclonal antibodies are advantageous in that they are synthesized by the hybridoma culture, uncontaminated by other immunoglobulins. The modifier “monoclonal” indicates the character of the antibody as being obtained from a substantially homogeneous population of antibodies, and is not to be construed as requiring production of the antibody by any particular method. For example, the monoclonal antibodies to be used in accordance with the present invention may be made by the hybridoma method first described by Kohler et al., Nature, 256: 495 (1975), or may be made by recombinant DNA methods (see, e.g., U.S. Pat. No. 4,816,567). The “monoclonal antibodies” may also be isolated from phage antibody libraries using the techniques described in Clackson et al., Nature, 352: 624-628 (1991) and Marks et al., J. Mol. Biol., 222: 581-597 (1991), for example.

[0127] The term “human antibody” includes antibodies having variable and constant regions corresponding substantially to human germline immunoglobulin sequences known in the art, including, for example, those described by Kabat et al. (See Kabat et al. (1991) loc. cit.). The human antibodies of the invention may include amino acid residues not encoded by human germline immunoglobulin sequences (e.g., mutations introduced by random or site-specific mutagenesis in vitro or by somatic mutation in vivo), for example in the CDRs, and in particular, CDR3. The human antibody can have at least one, two, three, four, five, or more positions replaced with an amino acid residue that is not encoded by the human germline immunoglobulin sequence. It is emphasized that the definition of human antibodies as used herein also contemplates fully human antibodies, which include only non-artificially and/or genetically altered human sequences of antibodies as those can be derived by using technologies using systems such as the Xenomice.

[0128] Examples of “antibody variants” include humanized variants of non-human antibodies, “affinity matured” antibodies (see, e.g. Hawkins et al. J. Mol. Biol. 254, 889-896 (1992) and Lowman et al., Biochemistry 30, 10832-10837 (1991)) and antibody mutants with altered effector function (s) (see, e.g., U.S. Pat. No. 5,648,260, Kontermann and Dübel (2010), loc. cit. and Little (2009), loc. cit.).

[0129] As used herein, “in vitro generated antibody” refers to an antibody where all or part of the variable region (e.g., at least one CDR) is generated in a non-immune cell selection (e.g., an in vitro phage display, protein chip or any other method in which candidate sequences can be tested for their ability to bind to an antigen). This term thus preferably excludes sequences generated by genomic rearrangement in an immune cell.

[0130] The pairing of a VH and VL together forms a single antigen-binding site. The CH domain most proximal to VH is designated as CH1. Each L chain is linked to an H chain by one covalent disulfide bond, while the two H chains are linked to each other by one or more disulfide bonds depending on the H chain isotype. The VH and VL domains consist of four regions of relatively conserved sequences called framework regions (FR1, FR2, FR3, and FR4), which form a scaffold for three regions of hypervariable sequences (complementarity determining regions, CDRs). The CDRs contain most of the residues responsible for specific interactions of the antibody with the antigen. CDRs are referred to as CDR 1, CDR2, and CDR3. Accordingly, CDR constituents on the heavy chain are referred to as H1, H2, and H3, while CDR constituents on the light chain are referred to as L1, L2, and L3.

[0131] The term “variable” refers to the portions of the immunoglobulin domains that exhibit variability in their sequence and that are involved in determining the specificity and binding affinity of a particular antibody (i.e., the “variable domain(s)”). Variability is not evenly distributed throughout the variable domains of antibodies; it is concentrated in sub-domains of each of the heavy and light chain variable regions. These sub-domains are called “hypervariable” regions or “complementarity determining regions” (CDRs). The more conserved (i.e., non-hypervariable) portions of the variable domains are called the “framework” regions (FRM). The variable domains of naturally occurring heavy and light chains each comprise four FRM regions, largely adopting a β-sheet configuration, connected by three hypervariable regions, which form loops connecting, and in some cases forming part of, the β-sheet structure. The hypervariable regions in each chain are held together in close proximity by the FRM and, with the hypervariable regions from the other chain, contribute to the formation of the antigen-binding site (see Kabat et al., loc. cit.). The constant domains are not directly involved in antigen binding, but exhibit various effector functions, such as, for example, antibody-dependent, cell-mediated cytotoxicity and complement activation.

[0132] The terms “CDR”, and its plural “CDRs”, refer to a complementarity determining region (CDR) of which three make up the binding character of a light chain variable region (CDRL1, CDRL2 and CDRL3) and three make up the binding character of a heavy chain variable region (CDRH1, CDRH2 and CDRH3). CDRs contribute to the functional activity of an antibody molecule and are separated by amino acid sequences that comprise scaffolding or framework regions. The exact definitional CDR boundaries and lengths are subject to different classification and numbering systems. CDRs may therefore be referred to by Kabat, Chothia, contact or any other boundary definitions, including the numbering system described herein. Despite differing boundaries, each of these systems has some degree of overlap in what constitutes the so called “hypervariable regions” within the variable sequences. CDR definitions according to these systems may therefore differ in length and boundary areas with respect to the adjacent framework region. See for example Kabat, Chothia, and/or MacCallum (Kabat et al., loc. cit.; Chothia et al., J. Mol. Biol, 1987, 196: 901; and MacCallum et al., J. Mol. Biol, 1996, 262: 732). However, the numbering in accordance with the so-called Kabat system is preferred. The CDR3 of the light chain and, particularly, CDR3 of the heavy chain may constitute the most important determinants in antigen binding within the light and heavy chain variable regions. In some antibody constructs, the heavy chain CDR3 appears to constitute the major area of contact between the antigen and the antibody. In vitro selection schemes in which CDR3 alone is varied can be used to vary the binding properties of an antibody or determine which residues contribute to the binding of an antigen.

[0133] “Consisting essentially of” means that the amino acid sequence can vary by about 1, 2, 3, 4, 5, 6, 7, 8, 9, 10, 11, 12, 13, 14, or 15% relative to the recited SEQ ID NO: sequence and still retain biological activity, as described herein.

[0134] In some embodiments, the antibody constructs of the invention are isolated proteins or substantially pure proteins. An “isolated” protein is unaccompanied by at least some of the material with which it is normally associated in its natural state, for example constituting at least about 5%, or at least about 50% by weight of the total protein in a given sample. It is understood that the isolated protein may constitute from 5 to 99.9% by weight of the total protein content depending on the circumstances. For example, the protein may be made at a significantly higher concentration through the use of an inducible promoter or high expression promoter, such that the protein is made at increased concentration levels. The definition includes the production of an antigen binding protein in a wide variety of organisms and/or host cells that are known in the art.

[0135] For amino acid sequences, sequence identity and/or similarity is determined by using standard techniques known in the art, including, but not limited to, the local sequence identity algorithm of Smith and Waterman, 1981, Adv. Appl. Math. 2:482, the sequence identity alignment algorithm of Needleman and Wunsch, 1970, J. Mol. Biol. 48:443, the search for similarity method of Pearson and Lipman, 1988, Proc. Nat. Acad. Sci. U.S.A. 85:2444, computerized implementations of these algorithms (GAP, BESTFIT, FASTA, and TFASTA in the Wisconsin Genetics Software Package, Genetics Computer Group, 575 Science Drive, Madison, Wis.), the Best Fit sequence program described by Devereux et al., 1984, Nucl. Acid Res. 12:387-395, preferably using the default settings, or by inspection. Preferably, percent identity is calculated by FastDB based upon the following parameters: mismatch penalty of 1; gap penalty of 1; gap size penalty of 0.33; and joining penalty of 30, “Current Methods in Sequence Comparison and Analysis,” Macromolecule Sequencing and Synthesis, Selected Methods and Applications, pp 127-149 (1988), Alan R. Liss, Inc.

[0136] An example of a useful algorithm is PILEUP. PILEUP creates a multiple sequence alignment from a group of related sequences using progressive, pairwise alignments. It can also plot a tree showing the clustering relationships used to create the alignment. PILEUP uses a simplification of the progressive alignment method of Feng & Doolittle, 1987, J. Mol. Evol. 35:351-360; the method is similar to that described by Higgins and Sharp, 1989, CABIOS 5:151-153. Useful PILEUP parameters including a default gap weight of 3.00, a default gap length weight of 0.10, and weighted end gaps.

[0137] Another example of a useful algorithm is the BLAST algorithm, described in: Altschul et al., 1990, J. Mol. Biol. 215:403-410; Altschul et al., 1997, Nucleic Acids Res. 25:3389-3402; and Karin et al., 1993, Proc. Natl. Acad. Sci. U.S.A. 90:5873-5787. A particularly useful BLAST program is the WU-BLAST-2 program which was obtained from Altschul et al., 1996, Methods in Enzymology 266:460-480. WU-BLAST-2 uses several search parameters, most of which are set to the default values. The adjustable parameters are set with the following values: overlap span=1, overlap fraction=0.125, word threshold (T)=II. The HSP S and HSP S2 parameters are dynamic values and are established by the program itself depending upon the composition of the particular sequence and composition of the particular database against which the sequence of interest is being searched; however, the values may be adjusted to increase sensitivity.

[0138] An additional useful algorithm is gapped BLAST as reported by Altschul et al., 1993, Nucl. Acids Res. 25:3389-3402. Gapped BLAST uses BLOSUM-62 substitution scores; threshold T parameter set to 9; the two-hit method to trigger ungapped extensions, charges gap lengths of k a cost of 10+k; Xu set to 16, and Xg set to 40 for database search stage and to 67 for the output stage of the algorithms. Gapped alignments are triggered by a score corresponding to about 22 bits.

[0139] Generally, the amino acid homology, similarity, or identity between individual variant CDRs are at least 80% to the sequences depicted herein, and more typically with preferably increasing homologies or identities of at least 85%, 90%, 91%, 92%, 93%, 94%, 95%, 96%, 97%, 98%, 99%, and almost 100%. In a similar manner, “percent (%) nucleic acid sequence identity” with respect to the nucleic acid sequence of the binding proteins identified herein is defined as the percentage of nucleotide residues in a candidate sequence that are identical with the nucleotide residues in the coding sequence of the antigen binding protein. A specific method utilizes the BLASTN module of WU-BLAST-2 set to the default parameters, with overlap span and overlap fraction set to 1 and 0.125, respectively.

[0140] Generally, the nucleic acid sequence homology, similarity, or identity between the nucleotide sequences encoding individual variant CDRs and the nucleotide sequences depicted herein are at least 80%, and more typically with preferably increasing homologies or identities of at least 80%, 81%, 82%, 83%, 84%, 85%, 86%, 87%, 88%, 89%, 90%, 91%, 92%, 93%, 94%, 95%, 96%, 97%, 98%, or 99%, and almost 100%.

[0141] Thus, a “variant CDR” is one with the specified homology, similarity, or identity to the parent CDR of the invention, and shares biological function, including, but not limited to, at least 80%, 81%, 82%, 83%, 84%, 85%, 86%, 87%, 88%, 89%, 90%, 91%, 92%, 93%, 94%, 95%, 96%, 97%, 98%, or 99% of the specificity and/or activity of the parent CDR.

[0142] While the site or region for introducing an amino acid sequence variation is predetermined, the mutation per se need not be predetermined. For example, in order to optimize the performance of a mutation at a given site, random mutagenesis may be conducted at the target codon or region and the expressed antigen binding protein CDR variants screened for the optimal combination of desired activity. Techniques for making substitution mutations at predetermined sites in DNA having a known sequence are well known, for example, M13 primer mutagenesis and PCR mutagenesis. Screening of the mutants is done using assays of antigen binding protein activities, such as CDH19 binding.

[0143] The term “amino acid” or “amino acid residue” typically refers to an amino acid having its art recognized definition such as an amino acid selected from the group consisting of: alanine (Ala or A); arginine (Arg or R); asparagine (Asn or N); aspartic acid (Asp or D); cysteine (Cys or C); glutamine (Gln or Q); glutamic acid (Glu or E); glycine (Gly or G); histidine (His or H); isoleucine (He or I): leucine (Leu or L); lysine (Lys or K); methionine (Met or M); phenylalanine (Phe or F); pro line (Pro or P); serine (Ser or S); threonine (Thr or T); tryptophan (Trp or W); tyrosine (Tyr or Y); and valine (Val or V), although modified, synthetic, or rare amino acids may be used as desired. Generally, amino acids can be grouped as having a nonpolar side chain (e.g., Ala, Cys, He, Leu, Met, Phe, Pro, Val); a negatively charged side chain (e.g., Asp, Glu); a positively charged sidechain (e.g., Arg, His, Lys); or an uncharged polar side chain (e.g., Asn, Cys, Gln, Gly, His, Met, Phe, Ser, Thr, Trp, and Tyr).

[0144] The term “hypervariable region” (also known as “complementarity determining regions” or CDRs) when used herein refers to the amino acid residues of an antibody which are (usually three or four short regions of extreme sequence variability) within the V-region domain of an immunoglobulin which form the antigen-binding site and are the main determinants of antigen specificity. There are at least two methods for identifying the CDR residues: (1) An approach based on cross-species sequence variability (i. e., Kabat et al., loc. cit.); and (2) An approach based on crystallographic studies of antigen-antibody complexes (Chothia, C. et al., J. Mol. Biol. 196: 901-917 (1987)). However, to the extent that two residue identification techniques define regions of overlapping, but not identical regions, they can be combined to define a hybrid CDR. However, in general, the CDR residues are preferably identified in accordance with the so-called Kabat (numbering) system.

[0145] The term “framework region” refers to the art-recognized portions of an antibody variable region that exist between the more divergent (i.e., hypervariable) CDRs. Such framework regions are typically referred to as frameworks 1 through 4 (FR1, FR2, FR3, and FR4) and provide a scaffold for the presentation of the six CDRs (three from the heavy chain and three from the light chain) in three dimensional space, to form an antigen-binding surface.

[0146] Typically, CDRs form a loop structure that can be classified as a canonical structure. The term “canonical structure” refers to the main chain conformation that is adopted by the antigen binding (CDR) loops. From comparative structural studies, it has been found that five of the six antigen binding loops have only a limited repertoire of available conformations. Each canonical structure can be characterized by the torsion angles of the polypeptide backbone. Correspondent loops between antibodies may, therefore, have very similar three dimensional structures, despite high amino acid sequence variability in most parts of the loops (Chothia and Lesk, J. Mol. Biol., 1987, 196: 901; Chothia et al., Nature, 1989, 342: 877; Martin and Thornton, J. Mol. Biol, 1996, 263: 800, each of which is incorporated by reference in its entirety). Furthermore, there is a relationship between the adopted loop structure and the amino acid sequences surrounding it. The conformation of a particular canonical class is determined by the length of the loop and the amino acid residues residing at key positions within the loop, as well as within the conserved framework (i.e., outside of the loop). Assignment to a particular canonical class can therefore be made based on the presence of these key amino acid residues. The term “canonical structure” may also include considerations as to the linear sequence of the antibody, for example, as catalogued by Kabat (Kabat et al., loc. cit.). The Kabat numbering scheme (system) is a widely adopted standard for numbering the amino acid residues of an antibody variable domain in a consistent manner and is the preferred scheme applied in the present invention as also mentioned elsewhere herein. Additional structural considerations can also be used to determine the canonical structure of an antibody. For example, those differences not fully reflected by Kabat numbering can be described by the numbering system of Chothia et al and/or revealed by other techniques, for example, crystallography and two or three-dimensional computational modeling. Accordingly, a given antibody sequence may be placed into a canonical class which allows for, among other things, identifying appropriate chassis sequences (e.g., based on a desire to include a variety of canonical structures in a library). Kabat numbering of antibody amino acid sequences and structural considerations as described by Chothia et al., loc. cit. and their implications for construing canonical aspects of antibody structure, are described in the literature.

[0147] CDR3 is typically the greatest source of molecular diversity within the antibody-binding site. H3, for example, can be as short as two amino acid residues or greater than 26 amino acids. The subunit structures and three-dimensional configurations of different classes of immunoglobulins are well known in the art. For a review of the antibody structure, see Antibodies: A Laboratory Manual, Cold Spring Harbor Laboratory, eds. Harlow et al., 1988. One of skill in the art will recognize that each subunit structure, e.g., a CH, VH, CL, VL, CDR, FR structure, comprises active fragments, e.g., the portion of the VH, VL, or CDR subunit the binds to the antigen, i.e., the antigen-binding fragment, or, e.g., the portion of the CH subunit that binds to and/or activates, e.g., an Fc receptor and/or complement. The CDRs typically refer to the Kabat CDRs, as described in Sequences of Proteins of immunological Interest, US Department of Health and Human Services (1991), eds. Kabat et al. Another standard for characterizing the antigen binding site is to refer to the hypervariable loops as described by Chothia. See, e.g., Chothia, et al. (1987; J. Mol. Biol. 227:799-817); and Tomlinson et al. (1995) EMBO J. 14: 4628-4638. Still another standard is the AbM definition used by Oxford Molecular's AbM antibody modeling software. See, generally, e.g., Protein Sequence and Structure Analysis of Antibody Variable Domains. In: Antibody Engineering Lab Manual (Ed.: Duebel, S. and Kontermann, R., Springer-Verlag, Heidelberg). Embodiments described with respect to Kabat CDRs can alternatively be implemented using similar described relationships with respect to Chothia hypervariable loops or to the AbM-defined loops.

[0148] The sequence of antibody genes after assembly and somatic mutation is highly varied, and these varied genes are estimated to encode 10¹⁰ different antibody molecules (Immunoglobulin Genes, 2^{nd} ed., eds. Jonio et al., Academic Press, San Diego, Calif., 1995). Accordingly, the immune system provides a repertoire of immunoglobulins. The term “repertoire” refers to at least one nucleotide sequence derived wholly or partially from at least one sequence encoding at least one immunoglobulin. The sequence(s) may be generated by rearrangement in vivo of the V, D, and J segments of heavy chains, and the V and J segments of light chains. Alternatively, the sequence(s) can be generated from a cell in response to which rearrangement occurs, e.g., in vitro stimulation. Alternatively, part or all of the sequence(s) may be obtained by DNA splicing, nucleotide synthesis, mutagenesis, and other methods, see, e.g., U.S. Pat. No. 5,565,332. A repertoire may include only one sequence or may include a plurality of sequences, including ones in a genetically diverse collection.

[0149] The term “binding molecule” or “antibody construct” in the sense of the present disclosure indicates any molecule capable of (specifically) binding to, interacting with or recognizing the target molecules CDH19 and CD3. Such molecules or constructs may include proteinaceous parts and non-proteinaceous parts (e.g. chemical linkers or chemical cross-linking agents such as glutaraldehyde).

[0150] In the event that a linker is used, this linker is preferably of a length and sequence sufficient to ensure that each of the first and second domains can, independently from one another, retain their differential binding specificities. Most preferably and as documented in the appended examples, the antibody construct of the invention is a “bispecific single chain antibody construct”, more prefereably a bispecific single chain Fv (scFv). Bispecific single chain molecules are known in the art and are described in WO 99/54440, Mack, J. Immunol. (1997), 158, 3965-3970, Mack, PNAS, (1995), 92, 7021-7025, Kufer, Cancer Immunol. Immunother., (1997), 45, 193-197, Löffler, Blood, (2000), 95, 6, 2098-2103, Brühl, Immunol., (2001), 166, 2420-2426, Kipriyanov, J. Mol. Biol., (1999), 293, 41-56.

[0151] The said variable domains comprised in the herein described antibody constructs may be connected by additional linker sequences. The term “peptide linker” defines in accordance with the present invention an amino acid sequence by which the amino acid sequences of the first domain and the second domain of the antibody construct of the invention are linked with each other. An essential technical feature of such peptide linker is that said peptide linker does not comprise any polymerization activity. Among the suitable peptide linkers are those described in U.S. Pat. Nos. 4,751,180 and 4,935,233 or WO 88/09344. A preferred embodiment of a peptide linker is characterized by the amino acid sequence Gly-Gly-Gly-Gly-Ser, i.e. Gly4Ser, or polymers thereof, i.e. (Gly4Ser)x, where x is an integer 1 or greater. The characteristics of said peptide linker, which comprise the absence of the promotion of secondary structures are known in the art and described e.g. in Dall'Acqua et al. (Biochem. (1998) 37, 9266-9273), Cheadle et al. (Mol Immunol (1992) 29, 21-30) and Raag and Whitlow (FASEB (1995) 9(1), 73-80). Peptide linkers which also do not promote any secondary structures are preferred. The linkage of said domains to each other can be provided by, e.g. genetic engineering, as described in the examples. Methods for preparing fused and operatively linked bispecific single chain constructs and expressing them in mammalian cells or bacteria are well-known in the art (e.g. WO 99/54440 or Sambrook et al., Molecular Cloning: A Laboratory Manual, Cold Spring Harbor Laboratory Press, Cold Spring Harbor, N.Y., 2001).

[0152] For peptide linkers, which connect the at least two binding domains in the antibody construct of the invention peptide linkers are preferred which comprise only a few number of amino acid residues, e.g. 12 amino acid residues or less. Thus, peptide linker of 12, 11, 10, 9, 8, 7, 6 or 5 amino acid residues are preferred. An envisaged peptide linker with less than 5 amino acids comprises 4, 3, 2 or one amino acid(s) wherein Gly-rich linkers are preferred. A particularly preferred “single” amino acid in context of said “peptide linker” is Gly. Accordingly, said peptide linker may consist of the single amino acid Gly.

[0153] The term “multispecific” as used herein refers to a binding molecule which is an antibody construct and comprises at least a first and a second binding domain, wherein the first binding domain is capable of binding to one antigen or target, and the second binding domain is capable of binding to another antigen or target. Accordingly, antibody constructs according to the invention comprise at least specificities for two different antigens or targets and are at least bispecific. The “antibody construct” of the invention also comprises multispecific binding molecules such as e.g. trispecific binding molecules, the latter ones including three binding domains.

[0154] It is also envisaged that the antibody construct of the invention has, in addition to its function to bind to the target molecules CDH19 and CD3, a further function. In this format, the antibody construct is a tri- or multifunctional antibody construct by targeting plasma cells through binding to CDH19, mediating cytotoxic T cell activity through CD3 binding and providing a further function such as a fully functional Fc constant domain mediating antibody-dependent cellular cytotoxicity through recruitment of effector cells like NK cells, a label (fluorescent etc.), a therapeutic agent such as, e.g. a toxin or radionuclide, and/or means to enhance serum half-life, etc.

[0155] The term “binding domain” characterizes in connection with the present invention a domain which is capable of specifically binding to/interacting with a given target epitope or a given target site on the target molecules CDH19 and CD3.

[0156] Binding domains can be derived from a binding domain donor such as for example an antibody. It is envisaged that a binding domain of the present invention comprises at least said part of any of the aforementioned binding domains that is required for binding to/interacting with a given target epitope or a given target site on the target molecules CDH19 and CD3.

[0157] It is envisaged that the binding domain of the aforementioned binding domain donors is characterized by that part of these donors that is responsible for binding the respective target, i.e. when that part is removed from the binding domain donor, said donor loses its binding capability. “Loses” means a reduction of at least 50% of the binding capability when compared with the binding donor. Methods to map these binding sites are well known in the art—it is therefore within the standard knowledge of the skilled person to locate/map the binding site of a binding domain donor and, thereby, to “derive” said binding domain from the respective binding domain donors.

[0158] The term “epitope” refers to a site on an antigen to which a binding domain, such as an antibody or immunoglobulin or derivative or fragment of an antibody or of an immunoglobulin, specifically binds. An “epitope” is antigenic and thus the term epitope is sometimes also referred to herein as “antigenic structure” or “antigenic determinant”. Thus, the binding domain is an “antigen-interaction-site”. Said binding/interaction is also understood to define a “specific recognition”. In one example, said binding domain which (specifically) binds to/interacts with a given target epitope or a given target site on the target molecules CDH19 and CD3 is an antibody or immunoglobulin, and said binding domain is a VH and/or VL region of an antibody or of an immunoglobulin.

[0159] “Epitopes” can be formed both by contiguous amino acids or non-contiguous amino acids juxtaposed by tertiary folding of a protein. A “linear epitope” is an epitope where an amino acid primary sequence comprises the recognized epitope. A linear epitope typically includes at least 3 or at least 4, and more usually, at least 5 or at least 6 or at least 7, for example, about 8 to about 10 amino acids in a unique sequence.

[0160] A “conformational epitope”, in contrast to a linear epitope, is an epitope wherein the primary sequence of the amino acids comprising the epitope is not the sole defining component of the epitope recognized (e.g., an epitope wherein the primary sequence of amino acids is not necessarily recognized by the binding domain). Typically a conformational epitope comprises an increased number of amino acids relative to a linear epitope. With regard to recognition of conformational epitopes, the binding domain recognizes a three-dimensional structure of the antigen, preferably a peptide or protein or fragment thereof (in the context of the present invention, the antigen for one of the binding domains is comprised within the CDH19 protein). For example, when a protein molecule folds to form a three-dimensional structure, certain amino acids and/or the polypeptide backbone forming the conformational epitope become juxtaposed enabling the antibody to recognize the epitope. Methods of determining the conformation of epitopes include, but are not limited to, x-ray crystallography, two-dimensional nuclear magnetic resonance (2D-NMR) spectroscopy and site-directed spin labelling and electron paramagnetic resonance (EPR) spectroscopy. Moreover, the provided examples describe a further method to characterize a given binding domain by way of binning, which includes a test whether the given binding domain binds to one or more epitope cluster(s) of a given protein, in particular CDH19.

[0161] As used herein, the term “epitope cluster” denotes the entirety of epitopes lying in a defined contiguous stretch of an antigen. An epitope cluster can comprise one, two or more epitopes. The concept of epitope cluster is also used in the characterization of the features of the antibody constructs of the invention.

[0162] The terms “(capable of) binding to”, “specifically recognizing”, “directed to” and “reacting with” mean in accordance with this invention that a binding domain is capable of specifically interacting with one or more, preferably at least two, more preferably at least three and most preferably at least four amino acids of an epitope.

[0163] As used herein, the terms “specifically interacting”, “specifically binding” or “specifically bind(s)” mean that a binding domain exhibits appreciable affinity for a particular protein or antigen and, generally, does not exhibit significant reactivity with proteins or antigens other than CDH19 or CD3. “Appreciable affinity” includes binding with an affinity of about 10⁻⁶M (KD) or stronger. Preferably, binding is considered specific when binding affinity is about 10⁻¹² to 10⁻⁸ M, 10⁻¹² to 10⁻⁹ M, 10⁻¹² to 10⁻¹⁰ M, 10⁻¹¹ to 10⁻⁸ M, preferably of about 10⁻¹¹ to 10⁻⁹ M. Whether a binding domain specifically reacts with or binds to a target can be tested readily by, inter alia, comparing the reaction of said binding domain with a target protein or antigen with the reaction of said binding domain with proteins or antigens other than CDH19 or CD3. Preferably, a binding domain of the invention does not essentially bind or is not capable of binding to proteins or antigens other than CDH19 or CD3 (i.e. the first binding domain is not capable of binding to proteins other than CDH19 and the second binding domain is not capable of binding to proteins other than CD3).

[0164] The term “does not essentially bind”, or “is not capable of binding” means that a binding domain of the present invention does not bind another protein or antigen other than CDH19 or CD3, i.e., does not show reactivity of more than 30%, preferably not more than 20%, more preferably not more than 10%, particularly preferably not more than 9%, 8%, 7%, 6% or 5% with proteins or antigens other than CDH19 or CD3, whereby binding to CDH19 or CD3, respectively, is set to be 100%.

[0165] Specific binding is believed to be effected by specific motifs in the amino acid sequence of the binding domain and the antigen. Thus, binding is achieved as a result of their primary, secondary and/or tertiary structure as well as the result of secondary modifications of said structures. The specific interaction of the antigen-interaction-site with its specific antigen may result in a simple binding of said site to the antigen. Moreover, the specific interaction of the antigen-interaction-site with its specific antigen may alternatively or additionally result in the initiation of a signal, e.g. due to the induction of a change of the conformation of the antigen, an oligomerization of the antigen, etc.

[0166] Proteins (including fragments thereof, preferably biologically active fragments, and peptides, usually having less than 30 amino acids) comprise one or more amino acids coupled to each other via a covalent peptide bond (resulting in a chain of amino acids). The term “polypeptide” as used herein describes a group of molecules, which consist of more than 30 amino acids. Polypeptides may further form multimers such as dimers, trimers and higher oligomers, i.e. consisting of more than one polypeptide molecule. Polypeptide molecules forming such dimers, trimers etc. may be identical or non-identical. The corresponding higher order structures of such multimers are, consequently, termed homo- or heterodimers, homo- or heterotrimers etc. An example for a hereteromultimer is an antibody molecule, which, in its naturally occurring form, consists of two identical light polypeptide chains and two identical heavy polypeptide chains. The terms “polypeptide” and “protein” also refer to naturally modified polypeptides/proteins wherein the modification is effected e.g. by post-translational modifications like glycosylation, acetylation, phosphorylation and the like. A “polypeptide” when referred to herein may also be chemically modified such as pegylated. Such modifications are well known in the art.

[0167] “Isolated” when used to describe the antibody construct disclosed herein, means a antibody construct that has been identified, separated and/or recovered from a component of its production environment. Preferably, the isolated antibody construct is free of association with all other components from its production environment. Contaminant components of its production environment, such as that resulting from recombinant transfected cells, are materials that would typically interfere with diagnostic or therapeutic uses for the polypeptide, and may include enzymes, hormones, and other proteinaceous or non-proteinaceous solutes. In preferred embodiments, the antibody construct will be purified (1) to a degree sufficient to obtain at least 15 residues of N-terminal or internal amino acid sequence by use of a spinning cup sequenator, or (2) to homogeneity by SDS-PAGE under non-reducing or reducing conditions using Coomassie blue or, preferably, silver stain. Ordinarily, however, an isolated antibody will be prepared by at least one purification step.

[0168] Amino acid sequence modifications of the antibody constructs described herein are contemplated. For example, it may be desirable to improve the binding affinity and/or other biological properties of the antibody. Amino acid sequence variants of the antibody constructs are prepared by introducing appropriate nucleotide changes into the antibody constructs nucleic acid, or by peptide synthesis.

[0169] Such modifications include, for example, deletions from, and/or insertions into, and/or substitutions of, residues within the amino acid sequences of the antibody constructs. Any combination of deletion, insertion, and substitution is made to arrive at the final construct, provided that the final construct possesses the desired characteristics. The amino acid changes also may alter post-translational processes of the antibody constructs, such as changing the number or position of glycosylation sites. Preferably, 1, 2, 3, 4, 5, 6, 7, 8, 9, or 10 amino acids may be substituted in a CDR, while 1, 2, 3, 4, 5, 6, 7, 8, 9, 10, 11, 12, 13, 14, 15, 16, 17, 18, 19, 20, or 25 amino acids may be substituted in the framework regions (FRs). The substitutions are preferably conservative substitutions as described herein. Additionally or alternatively, 1, 2, 3, 4, 5, or 6 amino acids may be inserted or deleted in each of the CDRs (of course, dependent on their length), while 1, 2, 3, 4, 5, 6, 7, 8, 9, 10, 11, 12, 13, 14, 15, 16, 17, 18, 19, 20, or 25 amino acids may be inserted or deleted in each of the FRs.

[0170] A useful method for identification of certain residues or regions of the antibody constructs that are preferred locations for mutagenesis is called “alanine scanning mutagenesis” as described by Cunningham and Wells in Science, 244: 1081-1085 (1989). Here, a residue or group of target residues within the antibody construct is/are identified (e.g. charged residues such as arg, asp, his, lys, and glu) and replaced by a neutral or negatively charged amino acid (most preferably alanine or polyalanine) to affect the interaction of the amino acids with the epitope.

[0171] Those amino acid locations demonstrating functional sensitivity to the substitutions then are refined by introducing further or other variants at, or for, the sites of substitution. Thus, while the site for introducing an amino acid sequence variation is predetermined, the nature of the mutation per se needs not to be predetermined. For example, to analyze the performance of a mutation at a given site, ala scanning or random mutagenesis is conducted at a target codon or region and the expressed antibody construct variants are screened for the desired activity.

[0172] Preferably, amino acid sequence insertions include amino- and/or carboxyl-terminal fusions ranging in length from 1, 2, 3, 4, 5, 6, 7, 8, 9 or 10 residues to polypeptides containing a hundred or more residues, as well as intrasequence insertions of single or multiple amino acid residues. An insertional variant of the antibody construct includes the fusion to the N- or C-terminus of the antibody to an enzyme or a fusion to a polypeptide which increases the serum half-life of the antibody.

[0173] Another type of variant is an amino acid substitution variant. These variants have preferably at least 1, 2, 3, 4, 5, 6, 7, 8, 9 or 10 amino acid residues in the antibody construct replaced by a different residue. The sites of greatest interest for substitutional mutagenesis include the CDRs of the heavy and/or light chain, in particular the hypervariable regions, but FR alterations in the heavy and/or light chain are also contemplated.

[0174] For example, if a CDR sequence encompasses 6 amino acids, it is envisaged that one, two or three of these amino acids are substituted. Similarly, if a CDR sequence encompasses 15 amino acids it is envisaged that one, two, three, four, five or six of these amino acids are substituted.

[0175] Generally, if amino acids are substituted in one or more or all of the CDRs of the heavy and/or light chain, it is preferred that the then-obtained “substituted” sequence is at least 60%, more preferably 65%, even more preferably 70%, particularly preferably 75%, more particularly preferably 80% identical to the “original” CDR sequence. This means that it is dependent of the length of the CDR to which degree it is identical to the “substituted” sequence. For example, a CDR having 5 amino acids is preferably 80% identical to its substituted sequence in order to have at least one amino acid substituted. Accordingly, the CDRs of the antibody construct may have different degrees of identity to their substituted sequences, e.g., CDRL1 may have 80%, while CDRL3 may have 90%.

[0176] Preferred substitutions (or replacements) are conservative substitutions. However, any substitution (including non-conservative substitution or one or more from the “exemplary substitutions” listed in Table 1, below) is envisaged as long as the antibody construct retains its capability to bind to CDH19 via the first binding domain and to CD3 epsilon via the second binding domain and/or its CDRs have an identity to the then substituted sequence (at least 60%, more preferably 65%, even more preferably 70%, particularly preferably 75%, more particularly preferably 80% identical to the “original” CDR sequence).

[0177] Conservative substitutions are shown in Table 1 under the heading of “preferred substitutions”. If such substitutions result in a change in biological activity, then more substantial changes, denominated “exemplary substitutions” in Table 1, or as further described below in reference to amino acid classes, may be introduced and the products screened for a desired characteristic.

TABLE 1
Amino Acid Substitutions

| Original | Exemplary Substitutions | Preferred Substitutions |
|---|---|---|
| Ala (A) | val, leu, ile | val |
| Arg (R) | lys, gin, asn | lys |
| Asn (N) | gin, his, asp, lys, arg | gln |
| Asp (D) | glu, asn | glu |
| Cys (C) | ser, ala | ser |
| Gln (Q) | asn, glu | asn |
| Glu (E) | asp, gin | asp |
| Gly (G) | ala | ala |
| His (H) | asn, gin, lys, arg | arg |
| Ile (I) | leu, val, met, ala, phe | leu |
| Leu (L) | norleucine, ile, val, met, ala | ile |
| Lys (K) | arg, gin, asn | arg |
| Met (M) | leu, phe, ile | leu |
| Phe (F) | leu, val, ile, ala, tyr | tyr |
| Pro (P) | ala | ala |
| Ser (S) | thr | thr |
| Thr (T) | ser | ser |
| Trp (W) | tyr, phe | tyr |
| Tyr (Y) | trp, phe, thr, ser | phe |
| Val (V) | ile, leu, met, phe, ala | leu |

[0178] Substantial modifications in the biological properties of the antibody construct of the present invention are accomplished by selecting substitutions that differ significantly in their effect on maintaining (a) the structure of the polypeptide backbone in the area of the substitution, for example, as a sheet or helical conformation, (b) the charge or hydrophobicity of the molecule at the target site, or (c) the bulk of the side chain. Naturally occurring residues are divided into groups based on common side-chain properties: (1) hydrophobic: norleucine, met, ala, val, leu, ile; (2) neutral hydrophilic: cys, ser, thr; (3) acidic: asp, glu; (4) basic: asn, gin, his, lys, arg; (5) residues that influence chain orientation: gly, pro; and (6) aromatic: trp, tyr, phe.

[0179] Non-conservative substitutions will entail exchanging a member of one of these classes for another class. Any cysteine residue not involved in maintaining the proper conformation of the antibody construct may be substituted, generally with serine, to improve the oxidative stability of the molecule and prevent aberrant crosslinking. Conversely, cysteine bond(s) may be added to the antibody to improve its stability (particularly where the antibody is an antibody fragment such as an Fv fragment).

[0180] A particularly preferred type of substitutional variant involves substituting one or more hypervariable region residues of a parent antibody (e. g. a humanized or human antibody). Generally, the resulting variant(s) selected for further development will have improved biological properties relative to the parent antibody from which they are generated. A convenient way for generating such substitutional variants involves affinity maturation using phage display. Briefly, several hypervariable region sites (e. g. 6-7 sites) are mutated to generate all possible amino acid substitutions at each site. The antibody variants thus generated are displayed in a monovalent fashion from filamentous phage particles as fusions to the gene III product of M13 packaged within each particle. The phage-displayed variants are then screened for their biological activity (e. g. binding affinity) as herein disclosed. In order to identify candidate hypervariable region sites for modification, alanine scanning mutagenesis can be performed to identify hypervariable region residues contributing significantly to antigen binding. Alternatively, or additionally, it may be beneficial to analyze a crystal structure of the antigen-antibody complex to identify contact points between the binding domain and, e.g., human CDH19. Such contact residues and neighbouring residues are candidates for substitution according to the techniques elaborated herein. Once such variants are generated, the panel of variants is subjected to screening as described herein and antibodies with superior properties in one or more relevant assays may be selected for further development.

[0181] Other modifications of the antibody construct are contemplated herein. For example, the antibody construct may be linked to one of a variety of non-proteinaceous polymers, e.g., polyethylene glycol, polypropylene glycol, polyoxyalkylenes, or copolymers of polyethylene glycol and polypropylene glycol. The antibody construct may also be entrapped in microcapsules prepared, for example, by coacervation techniques or by interfacial polymerization (for example, hydroxymethylcellulose or gelatine-microcapsules and poly (methylmethacylate) microcapsules, respectively), in colloidal drug delivery systems (for example, liposomes, albumin microspheres, microemulsions, nanoparticles and nanocapsules), or in macroemulsions. Such techniques are disclosed in Remington's Pharmaceutical Sciences, 16th edition, Oslo, A., Ed., (1980).

[0182] The antibody constructs disclosed herein may also be formulated as immuno-liposomes. A “liposome” is a small vesicle composed of various types of lipids, phospholipids and/or surfactant which is useful for delivery of a drug to a mammal. The components of the liposome are commonly arranged in a bilayer formation, similar to the lipid arrangement of biological membranes. Liposomes containing the antibody are prepared by methods known in the art, such as described in Epstein et al., Proc. Natl. Acad. Sci. USA, 82: 3688 (1985); Hwang et al., Proc. Natl Acad. Sci. USA, 77: 4030 (1980); U.S. Pat. Nos. 4,485,045 and 4,544,545; and WO 97/38731 published Oct. 23, 1997. Liposomes with enhanced circulation time are disclosed in U.S. Pat. No. 5,013,556. Particularly useful liposomes can be generated by the reverse phase evaporation method with a lipid composition comprising phosphatidylcholine, cholesterol and PEG-derivatized phosphatidylethanolamine (PEG-PE). Liposomes are extruded through filters of defined pore size to yield liposomes with the desired diameter. Fab′ fragments of the antibody of the present invention can be conjugated to the liposomes as described in Martin et al. J. Biol. Chem. 257: 286-288 (1982) via a disulfide interchange reaction. A chemotherapeutic agent is optionally contained within the liposome. See Gabizon et al. J. National Cancer Inst. 81 (19) 1484 (1989).

[0183] When using recombinant techniques, the antibody construct can be produced intracellularly, in the periplasmic space, or directly secreted into the medium. If the antibody construct is produced intracellularly, as a first step, the particulate debris, either host cells or lysed fragments, are removed, for example, by centrifugation or ultrafiltration. Carter et al., Bio/Technology 10: 163-167 (1992) describe a procedure for isolating antibodies which are secreted to the periplasmic space of E. coli.

[0184] The antibody construct composition prepared from the cells can be purified using, for example, hydroxylapatite chromatography, gel electrophoresis, dialysis, and affinity chromatography, with affinity chromatography being the preferred purification technique.

[0185] The term “nucleic acid” is well known to the skilled person and encompasses DNA (such as cDNA) and RNA (such as mRNA). The nucleic acid can be double stranded and single stranded, linear and circular. Said nucleic acid molecule is preferably comprised in a vector which is preferably comprised in a host cell. Said host cell is, e.g. after transformation or transfection with the nucleic acid sequence of the invention, capable of expressing the antibody construct. For that purpose the nucleic acid molecule is operatively linked with control sequences.

[0186] A vector is a nucleic acid molecule used as a vehicle to transfer (foreign) genetic material into a cell. The term “vector” encompasses—but is not restricted to—plasmids, viruses, cosmids and artificial chromosomes. In general, engineered vectors comprise an origin of replication, a multicloning site and a selectable marker. The vector itself is generally a nucleotide sequence, commonly a DNA sequence, that comprises an insert (transgene) and a larger sequence that serves as the “backbone” of the vector. Modern vectors may encompass additional features besides the transgene insert and a backbone: promoter, genetic marker, antibiotic resistance, reporter gene, targeting sequence, protein purification tag. Vectors called expression vectors (expression constructs) specifically are for the expression of the transgene in the target cell, and generally have control sequences such as a promoter sequence that drives expression of the transgene. Insertion of a vector into the target cell is usually called “transformation” for bacteria, “transfection” for eukaryotic cells, although insertion of a viral vector is also called “transduction”.

[0187] As used herein, the term “host cell” is intended to refer to a cell into which a nucleic acid encoding the antibody construct of the invention is introduced by way of transformation, transfection and the like. It should be understood that such terms refer not only to the particular subject cell but to the progeny or potential progeny of such a cell. Because certain modifications may occur in succeeding generations due to either mutation or environmental influences, such progeny may not, in fact, be identical to the parent cell, but are still included within the scope of the term as used herein.

[0188] As used herein, the term “expression” includes any step involved in the production of a antibody construct of the invention including, but not limited to, transcription, post-transcriptional modification, translation, post-translational modification, and secretion.

[0189] The term “control sequences” refers to DNA sequences necessary for the expression of an operably linked coding sequence in a particular host organism. The control sequences that are suitable for prokaryotes, for example, include a promoter, optionally an operator sequence, and a ribosome binding site. Eukaryotic cells are known to utilize promoters, polyadenylation signals, and enhancers.

[0190] A nucleic acid is “operably linked” when it is placed into a functional relationship with another nucleic acid sequence. For example, DNA for a presequence or secretory leader is operably linked to DNA for a polypeptide if it is expressed as a preprotein that participates in the secretion of the polypeptide; a promoter or enhancer is operably linked to a coding sequence if it affects the transcription of the sequence; or a ribosome binding site is operably linked to a coding sequence if it is positioned so as to facilitate translation. Generally, “operably linked” means that the DNA sequences being linked are contiguous, and, in the case of a secretory leader, contiguous and in reading phase. However, enhancers do not have to be contiguous. Linking is accomplished by ligation at convenient restriction sites. If such sites do not exist, the synthetic oligonucleotide adaptors or linkers are used in accordance with conventional practice.

[0191] The terms “host cell,” “target cell” or “recipient cell” are intended to include any individual cell or cell culture that can be or has/have been recipients for vectors or the incorporation of exogenous nucleic acid molecules, polynucleotides and/or proteins. It also is intended to include progeny of a single cell, and the progeny may not necessarily be completely identical (in morphology or in genomic or total DNA complement) to the original parent cell due to natural, accidental, or deliberate mutation. The cells may be prokaryotic or eukaryotic, and include but are not limited to bacteria, yeast cells, animal cells, and mammalian cells, e.g., murine, rat, macaque or human.

[0192] Suitable host cells include prokaryotes and eukaryotic host cells including yeasts, fungi, insect cells and mammalian cells.

[0193] The antibody construct of the invention can be produced in bacteria. After expression, the antibody construct of the invention, preferably the antibody construct is isolated from the E. coli cell paste in a soluble fraction and can be purified through, e.g., affinity chromatography and/or size exclusion. Final purification can be carried out similar to the process for purifying antibody expressed e. g, in CHO cells.

[0194] In addition to prokaryotes, eukaryotic microbes such as filamentous fungi or yeast are suitable cloning or expression hosts for the antibody construct of the invention. Saccharomyces cerevisiae, or common baker's yeast, is the most commonly used among lower eukaryotic host microorganisms. However, a number of other genera, species, and strains are commonly available and useful herein, such as Schizosaccharomyces pombe, Kluyveromyces hosts such as, e.g., K. lactis, K. fragilis (ATCC 12424), K. bulgaricus (ATCC 16045), K. wickeramii (ATCC 24178), K. waltii (ATCC 56500), K. drosophilarum (ATCC 36906), K. thermotolerans, and K. marxianus; yarrowia (EP 402 226); Pichia pastoris (EP 183 070); Candida; Trichoderma reesia (EP 244 234); Neurospora crassa; Schwanniomyces such as Schwanniomyces occidentalis; and filamentous fungi such as, e.g., Neurospora, Penicillium, Tolypocladium, and Aspergillus hosts such as A. nidulans and A. niger.

[0195] Suitable host cells for the expression of glycosylated antibody construct of the invention, preferably antibody derived antibody constructs are derived from multicellular organisms. Examples of invertebrate cells include plant and insect cells. Numerous baculoviral strains and variants and corresponding permissive insect host cells from hosts such as Spodoptera frugiperda (caterpillar), Aedes aegypti (mosquito), Aedes albopictus (mosquito), Drosophila melanogaster (fruit fly), and Bombyx mori have been identified. A variety of viral strains for transfection are publicly available, e. g., the L-1 variant of Autographa californica NPV and the Bm-5 strain of Bombyx mori NPV, and such viruses may be used as the virus herein according to the present invention, particularly for transfection of Spodoptera frugperda cells.

[0196] Plant cell cultures of cotton, corn, potato, soybean, petunia, tomato, Arabidopsis and tobacco can also be utilized as hosts. Cloning and expression vectors useful in the production of proteins in plant cell culture are known to those of skill in the art. See e.g. Hiatt et al., Nature (1989) 342: 76-78, Owen et al. (1992) Bio/Technology 10: 790-794, Artsaenko et al. (1995) The Plant J 8: 745-750, and Fecker et al. (1996) Plant Mol Biol 32: 979-986.

[0197] However, interest has been greatest in vertebrate cells, and propagation of vertebrate cells in culture (tissue culture) has become a routine procedure. Examples of useful mammalian host cell lines are monkey kidney CV1 line transformed by SV40 (COS-7, ATCC CRL 1651); human embryonic kidney line (293 or 293 cells subcloned for growth in suspension culture, Graham et al., J. Gen Virol. 36: 59 (1977)); baby hamster kidney cells (BHK, ATCC CCL 10); Chinese hamster ovary cells/−DHFR (CHO, Urlaub et al., Proc. Natl. Acad. Sci. USA 77: 4216 (1980)); mouse sertoli cells (TM4, Mather, Biol. Reprod. 23: 243-251 (1980)); monkey kidney cells (CVI ATCC CCL 70); African green monkey kidney cells (VERO-76, ATCC CRL1587); human cervical carcinoma cells (HELA, ATCC CCL 2); canine kidney cells (MDCK, ATCC CCL 34); buffalo rat liver cells (BRL 3A, ATCC CRL 1442); human lung cells (W138, ATCC CCL 75); human liver cells (Hep G2,1413 8065); mouse mammary tumor (MMT 060562, ATCC CCLS 1); TRI cells (Mather et al., Annals N. Y Acad. Sci. 383: 44-68 (1982)); MRC 5 cells; FS4 cells; and a human hepatoma line (Hep G2).

[0198] When using recombinant techniques, the antibody construct of the invention can be produced intracellularly, in the periplasmic space, or directly secreted into the medium. If the antibody construct is produced intracellularly, as a first step, the particulate debris, either host cells or lysed fragments, are removed, for example, by centrifugation or ultrafiltration. Carter et al., Bio/Technology 10: 163-167 (1992) describe a procedure for isolating antibodies which are secreted to the periplasmic space of E. coli. Briefly, cell paste is thawed in the presence of sodium acetate (pH 3.5), EDTA, and phenylmethylsulfonylfluoride (PMSF) over about 30 min. Cell debris can be removed by centrifugation. Where the antibody is secreted into the medium, supernatants from such expression systems are generally first concentrated using a commercially available protein concentration filter, for example, an Amicon or Millipore Pellicon ultrafiltration unit. A protease inhibitor such as PMSF may be included in any of the foregoing steps to inhibit proteolysis and antibiotics may be included to prevent the growth of adventitious contaminants.

[0199] The antibody construct of the invention prepared from the host cells can be purified using, for example, hydroxylapatite chromatography, gel electrophoresis, dialysis, and affinity chromatography, with affinity chromatography being the preferred purification technique.

[0200] The matrix to which the affinity ligand is attached is most often agarose, but other matrices are available. Mechanically stable matrices such as controlled pore glass or poly (styrenedivinyl) benzene allow for faster flow rates and shorter processing times than can be achieved with agarose. Where the antibody construct of the invention comprises a CH3 domain, the Bakerbond ABXMresin (J. T. Baker, Phillipsburg, N.J.) is useful for purification. Other techniques for protein purification such as fractionation on an ion-exchange column, ethanol precipitation, Reverse Phase HPLC, chromatography on silica, chromatography on heparin SEPHAROSE™ chromatography on an anion or cation exchange resin (such as a polyaspartic acid column), chromato-focusing, SDS-PAGE, and ammonium sulfate precipitation are also available depending on the antibody to be recovered.

[0201] The term “culturing” refers to the in vitro maintenance, differentiation, growth, proliferation and/or propagation of cells under suitable conditions in a medium.

[0202] As used herein, the term “pharmaceutical composition” relates to a composition for administration to a patient, preferably a human patient. The particular preferred pharmaceutical composition of this invention comprises the antibody construct of the invention. Preferably, the pharmaceutical composition comprises suitable formulations of carriers, stabilizers and/or excipients. In a preferred embodiment, the pharmaceutical composition comprises a composition for parenteral, transdermal, intraluminal, intraarterial, intrathecal and/or intranasal administration or by direct injection into tissue. It is in particular envisaged that said composition is administered to a patient via infusion or injection. Administration of the suitable compositions may be effected by different ways, e.g., by intravenous, intraperitoneal, subcutaneous, intramuscular, topical or intradermal administration. In particular, the present invention provides for an uninterrupted administration of the suitable composition. As a non-limiting example, uninterrupted, i.e. continuous administration may be realized by a small pump system worn by the patient for metering the influx of therapeutic agent into the body of the patient. The pharmaceutical composition comprising the antibody construct of the invention can be administered by using said pump systems. Such pump systems are generally known in the art, and commonly rely on periodic exchange of cartridges containing the therapeutic agent to be infused. When exchanging the cartridge in such a pump system, a temporary interruption of the otherwise uninterrupted flow of therapeutic agent into the body of the patient may ensue. In such a case, the phase of administration prior to cartridge replacement and the phase of administration following cartridge replacement would still be considered within the meaning of the pharmaceutical means and methods of the invention together make up one “uninterrupted administration” of such therapeutic agent.

[0203] The continuous or uninterrupted administration of these antibody constructs of the invention may be intravenous or subcutaneous by way of a fluid delivery device or small pump system including a fluid driving mechanism for driving fluid out of a reservoir and an actuating mechanism for actuating the driving mechanism. Pump systems for subcutaneous administration may include a needle or a cannula for penetrating the skin of a patient and delivering the suitable composition into the patient's body. Said pump systems may be directly fixed or attached to the skin of the patient independently of a vein, artery or blood vessel, thereby allowing a direct contact between the pump system and the skin of the patient. The pump system can be attached to the skin of the patient for 24 hours up to several days. The pump system may be of small size with a reservoir for small volumes. As a non-limiting example, the volume of the reservoir for the suitable pharmaceutical composition to be administered can be between 0.1 and 50 ml.

[0204] The continuous administration may be transdermal by way of a patch worn on the skin and replaced at intervals. One of skill in the art is aware of patch systems for drug delivery suitable for this purpose. It is of note that transdermal administration is especially amenable to uninterrupted administration, as exchange of a first exhausted patch can advantageously be accomplished simultaneously with the placement of a new, second patch, for example on the surface of the skin immediately adjacent to the first exhausted patch and immediately prior to removal of the first exhausted patch. Issues of flow interruption or power cell failure do not arise.

[0205] The inventive compositions may further comprise a pharmaceutically acceptable carrier. Examples of suitable pharmaceutical carriers are well known in the art and include solutions, e.g. phosphate buffered saline solutions, water, emulsions, such as oil/water emulsions, various types of wetting agents, sterile solutions, liposomes, etc. Compositions comprising such carriers can be formulated by well known conventional methods. Formulations can comprise carbohydrates, buffer solutions, amino acids and/or surfactants. Carbohydrates may be non-reducing sugars, preferably trehalose, sucrose, octasulfate, sorbitol or xylitol. In general, as used herein, “pharmaceutically acceptable carrier” means any and all solvents, dispersion media, coatings, antibacterial and antifungal agents, isotonic and absorption delaying agents, compatible with pharmaceutical administration. The use of such media and agents for pharmaceutically active substances is well known in the art. Acceptable carriers, excipients, or stabilizers are nontoxic to recipients at the dosages and concentrations employed and include: additional buffering agents; preservatives; co-solvents; antioxidants, including ascorbic acid and methionine; chelating agents such as EDTA; metal complexes (e.g., Zn-protein complexes); biodegradable polymers, such as polyesters; salt-forming counter-ions, such as sodium, polyhydric sugar alcohols; amino acids, such as alanine, glycine, asparagine, 2-phenylalanine, and threonine; sugars or sugar alcohols, such as trehalose, sucrose, octasulfate, sorbitol or xylitol stachyose, mannose, sorbose, xylose, ribose, myoinisitose, galactose, lactitol, ribitol, myoinisitol, galactitol, glycerol, cyclitols (e.g., inositol), polyethylene glycol; sulfur containing reducing agents, such as glutathione, thioctic acid, sodium thioglycolate, thioglycerol, [alpha]-monothioglycerol, and sodium thio sulfate; low molecular weight proteins, such as human serum albumin, bovine serum albumin, gelatin, or other immunoglobulins; and hydrophilic polymers, such as polyvinylpyrrolidone. Such formulations may be used for continuous administrations which may be intravenuous or subcutaneous with and/or without pump systems. Amino acids may be charged amino acids, preferably lysine, lysine acetate, arginine, glutamate and/or histidine. Surfactants may be detergents, preferably with a molecular weight of >1.2 KD and/or a polyether, preferably with a molecular weight of >3 KD. Non-limiting examples for preferred detergents are Tween 20, Tween 40, Tween 60, Tween 80 or Tween 85. Non-limiting examples for preferred polyethers are PEG 3000, PEG 3350, PEG 4000 or PEG 5000. Buffer systems used in the present invention can have a preferred pH of 5-9 and may comprise citrate, succinate, phosphate, histidine and acetate.

[0206] The compositions of the present invention can be administered to the subject at a suitable dose which can be determined e.g. by dose escalating studies by administration of increasing doses of the polypeptide of the invention exhibiting cross-species specificity described herein to non-chimpanzee primates, for instance macaques. As set forth above, the antibody construct of the invention exhibiting cross-species specificity described herein can be advantageously used in identical form in preclinical testing in non-chimpanzee primates and as drug in humans. These compositions can also be administered in combination with other proteinaceous and non-proteinaceous drugs. These drugs may be administered simultaneously with the composition comprising the polypeptide of the invention as defined herein or separately before or after administration of said polypeptide in timely defined intervals and doses. The dosage regimen will be determined by the attending physician and clinical factors. As is well known in the medical arts, dosages for any one patient depend upon many factors, including the patient's size, body surface area, age, the particular compound to be administered, sex, time and route of administration, general health, and other drugs being administered concurrently.

[0207] Preparations for parenteral administration include sterile aqueous or non-aqueous solutions, suspensions, and emulsions. Examples of non-aqueous solvents are propylene glycol, polyethylene glycol, vegetable oils such as olive oil, and injectable organic esters such as ethyl oleate. Aqueous carriers include water, alcoholic/aqueous solutions, emulsions or suspensions, including saline and buffered media. Parenteral vehicles include sodium chloride solution, Ringer's dextrose, dextrose and sodium chloride, lactated Ringer's, or fixed oils. Intravenous vehicles include fluid and nutrient replenishers, electrolyte replenishers (such as those based on Ringer's dextrose), and the like. Preservatives and other additives may also be present such as, for example, antimicrobials, anti-oxidants, chelating agents, inert gases and the like. In addition, the composition of the present invention might comprise proteinaceous carriers, like, e.g., serum albumin or immunoglobulin, preferably of human origin. It is envisaged that the composition of the invention might comprise, in addition to the polypeptide of the invention defined herein, further biologically active agents, depending on the intended use of the composition. Such agents might be drugs acting on the gastro-intestinal system, drugs acting as cytostatica, drugs preventing hyperurikemia, drugs inhibiting immunoreactions (e.g. corticosteroids), drugs modulating the inflammatory response, drugs acting on the circulatory system and/or agents such as cytokines known in the art. It is also envisaged that the antibody construct of the present invention is applied in a co-therapy, i.e., in combination with another anti-cancer medicament.

[0208] The biological activity of the pharmaceutical composition defined herein can be determined for instance by cytotoxicity assays, as described in the following examples, in WO 99/54440 or by Schlereth et al. (Cancer Immunol. Immunother. 20 (2005), 1-12). “Efficacy” or “in vivo efficacy” as used herein refers to the response to therapy by the pharmaceutical composition of the invention, using e.g. standardized NCI response criteria. The success or in vivo efficacy of the therapy using a pharmaceutical composition of the invention refers to the effectiveness of the composition for its intended purpose, i.e. the ability of the composition to cause its desired effect, i.e. depletion of pathologic cells, e.g. tumor cells. The in vivo efficacy may be monitored by established standard methods for the respective disease entities including, but not limited to white blood cell counts, differentials, Fluorescence Activated Cell Sorting, bone marrow aspiration. In addition, various disease specific clinical chemistry parameters and other established standard methods may be used. Furthermore, computer-aided tomography, X-ray, nuclear magnetic resonance tomography (e.g. for National Cancer Institute-criteria based response assessment [Cheson B D, Horning S J, Coiffier B, Shipp M A, Fisher R I, Connors J M, Lister T A, Vose J, Grillo-Lopez A, Hagenbeek A, Cabanillas F, Klippensten D, Hiddemann W, Castellino R, Harris N L, Armitage J O, Carter W, Hoppe R, Canellos G P. Report of an international workshop to standardize response criteria for non-Hodgkin's lymphomas. NCI Sponsored International Working Group. J Clin Oncol. 1999 April; 17(4):1244]), positron-emission tomography scanning, white blood cell counts, differentials, Fluorescence Activated Cell Sorting, bone marrow aspiration, lymph node biopsies/histologies, and various lymphoma specific clinical chemistry parameters (e.g. lactate dehydrogenase) and other established standard methods may be used.

[0209] Another major challenge in the development of drugs such as the pharmaceutical composition of the invention is the predictable modulation of pharmacokinetic properties. To this end, a pharmacokinetic profile of the drug candidate, i.e. a profile of the pharmacokinetic parameters that affect the ability of a particular drug to treat a given condition, can be established. Pharmacokinetic parameters of the drug influencing the ability of a drug for treating a certain disease entity include, but are not limited to: half-life, volume of distribution, hepatic first-pass metabolism and the degree of blood serum binding. The efficacy of a given drug agent can be influenced by each of the parameters mentioned above.

[0210] “Half-life” means the time where 50% of an administered drug are eliminated through biological processes, e.g. metabolism, excretion, etc.

[0211] By “hepatic first-pass metabolism” is meant the propensity of a drug to be metabolized upon first contact with the liver, i.e. during its first pass through the liver.

[0212] “Volume of distribution” means the degree of retention of a drug throughout the various compartments of the body, like e.g. intracellular and extracellular spaces, tissues and organs, etc. and the distribution of the drug within these compartments.

[0213] “Degree of blood serum binding” means the propensity of a drug to interact with and bind to blood serum proteins, such as albumin, leading to a reduction or loss of biological activity of the drug.

[0214] Pharmacokinetic parameters also include bioavailability, lag time (Tlag), Tmax, absorption rates, more onset and/or Cmax for a given amount of drug administered. “Bioavailability” means the amount of a drug in the blood compartment. “Lag time” means the time delay between the administration of the drug and its detection and measurability in blood or plasma.

[0215] “Tmax” is the time after which maximal blood concentration of the drug is reached, and “Cmax” is the blood concentration maximally obtained with a given drug. The time to reach a blood or tissue concentration of the drug which is required for its biological effect is influenced by all parameters. Pharmacokinetic parameters of bispecific single chain antibodies exhibiting cross-species specificity, which may be determined in preclinical animal testing in non-chimpanzee primates as outlined above, are also set forth e.g. in the publication by Schlereth et al. (Cancer Immunol. Immunother. 20 (2005), 1-12).

[0216] The term “toxicity” as used herein refers to the toxic effects of a drug manifested in adverse events or severe adverse events. These side events might refer to a lack of tolerability of the drug in general and/or a lack of local tolerance after administration. Toxicity could also include teratogenic or carcinogenic effects caused by the drug.

[0217] The term “safety”, “in vivo safety” or “tolerability” as used herein defines the administration of a drug without inducing severe adverse events directly after administration (local tolerance) and during a longer period of application of the drug. “Safety”, “in vivo safety” or “tolerability” can be evaluated e.g. at regular intervals during the treatment and follow-up period. Measurements include clinical evaluation, e.g. organ manifestations, and screening of laboratory abnormalities. Clinical evaluation may be carried out and deviations to normal findings recorded/coded according to NCI-CTC and/or MedDRA standards. Organ manifestations may include criteria such as allergy/immunology, blood/bone marrow, cardiac arrhythmia, coagulation and the like, as set forth e.g. in the Common Terminology Criteria for adverse events v3.0 (CTCAE). Laboratory parameters which may be tested include for instance hematology, clinical chemistry, coagulation profile and urine analysis and examination of other body fluids such as serum, plasma, lymphoid or spinal fluid, liquor and the like. Safety can thus be assessed e.g. by physical examination, imaging techniques (i.e. ultrasound, x-ray, CT scans, Magnetic Resonance Imaging (MRI), other measures with technical devices (i.e. electrocardiogram), vital signs, by measuring laboratory parameters and recording adverse events. For example, adverse events in non-chimpanzee primates in the uses and methods according to the invention may be examined by histopathological and/or histochemical methods.

[0218] The term “effective dose” or “effective dosage” is defined as an amount sufficient to achieve or at least partially achieve the desired effect. The term “therapeutically effective dose” is defined as an amount sufficient to cure or at least partially arrest the disease and its complications in a patient already suffering from the disease. Amounts effective for this use will depend upon the severity of the infection and the general state of the subject's own immune system. The term “patient” includes human and other mammalian subjects that receive either prophylactic or therapeutic treatment.

[0219] The term “effective and non-toxic dose” as used herein refers to a tolerable dose of an inventive antibody construct which is high enough to cause depletion of pathologic cells, tumor elimination, tumor shrinkage or stabilization of disease without or essentially without major toxic effects. Such effective and non-toxic doses may be determined e.g. by dose escalation studies described in the art and should be below the dose inducing severe adverse side events (dose limiting toxicity, DLT).

[0220] The above terms are also referred to e.g. in the Preclinical safety evaluation of biotechnology-derived pharmaceuticals S6; ICH Harmonised Tripartite Guideline; ICH Steering Committee meeting on Jul. 16, 1997.

[0221] The appropriate dosage, or therapeutically effective amount, of the antibody construct of the invention will depend on the condition to be treated, the severity of the condition, prior therapy, and the patient's clinical history and response to the therapeutic agent. The proper dose can be adjusted according to the judgment of the attending physician such that it can be administered to the patient one time or over a series of administrations. The pharmaceutical composition can be administered as a sole therapeutic or in combination with additional therapies such as anti-cancer therapies as needed.

[0222] The pharmaceutical compositions of this invention are particularly useful for parenteral administration, i.e., subcutaneously, intramuscularly, intravenously, intra-articular and/or intra-synovial. Parenteral administration can be by bolus injection or continuous infusion.

[0223] If the pharmaceutical composition has been lyophilized, the lyophilized material is first reconstituted in an appropriate liquid prior to administration. The lyophilized material may be reconstituted in, e.g., bacteriostatic water for injection (BWFI), physiological saline, phosphate buffered saline (PBS), or the same formulation the protein had been in prior to lyophilization.

[0224] In an internal analysis of proprietary mRNA expression data it has been surprisingly found that CDH19 expression is elevated in both primary and metastatic melanoma tumors compared to normal, untransformed tissues. Internal analysis also confirmed that expression of CDH19 in normal tissues is limited to neural crest derived peripheral nerve ganglia and nerve fibers. The differential CDH19 expression in normal and tumor tissues makes this protein attractive for cell-surface targeting therapeutics. Although CDH 19 was discussed as one marker as part of long lists of markers associated with some cancer types (see e.g. WO2009/055937) or Parkinson's disease (see e.g. WO2005/067391) CDH19 was never discussed as a prognostic marker or a drug target in connection with melanoma tumors.

[0225] As stated above, the present invention provides an isolated multispecific antibody construct comprising a first human binding domain capable of binding to human CDH19 on the surface of a target cell and a second domain capable of binding to human CD3 on the surface of a T cell.

[0226] The “CDH19 extracellular domain” or “CDH19 ECD” refers to a form of CDH19 which is essentially free of transmembrane and cytoplasmic domains of CDH19. It will be understood by the skilled artisan that the transmembrane domain identified for the CDH19 polypeptide of the present invention is identified pursuant to criteria routinely employed in the art for identifying that type of hydrophobic domain. The exact boundaries of a transmembrane domain may vary but most likely by no more than about 5 amino acids at either end of the domain specifically mentioned herein. A preferred human CDH19 ECD is shown in SEQ ID NO: 948. In this context it is understood that the CDH19 ECD represents the part of CDH19 on the surface of a target cell.

[0227] The T cell CD3 receptor complex is a protein complex and is composed of four distinct chains. In mammals, the complex contains a CD3γ chain, a CD3δ chain, and two CD3c (epsilon) chains. These chains associate with a molecule known as the T cell receptor (TCR) and the ζ chain to generate an activation signal in T lymphocytes.

[0228] The redirected lysis of target cells via the recruitment of T cells by a multispecific, at least bispecific, antibody construct involves cytolytic synapse formation and delivery of perforin and granzymes. The engaged T cells are capable of serial target cell lysis, and are not affected by immune escape mechanisms interfering with peptide antigen processing and presentation, or clonal T cell differentiation; see, for example, WO 2007/042261.

[0229] The affinity of the first binding domain for human CDH19 is preferably ≤15 nM, more preferably ≤10 nM, even more preferably ≤5 nM, even more preferably ≤1 nM, even more preferably ≤0.5 nM, even more preferably ≤0.1 nM, and most preferably ≤0.05 nM. The affinity of the first binding domain for macaque CDH19 is preferably ≤15 nM, more preferably ≤10 nM, even more preferably nM, even more preferably ≤1 nM, even more preferably ≤0.5 nM, even more preferably ≤0.1 nM, and most preferably ≤0.05 nM or even ≤0.01 nM. The affinity can be measured for example in a Biacore assay or in a Scatchard assay, e.g. as described in the Examples. The affinity gap for binding to macaque CDH19 versus human CDH19 is preferably [1:10-1:5] or [5:1-10:1], more preferably [1:5-5:1], and most preferably [1:2-3:1] or even [1:1-3:1]. Other methods of determining the affinity are well-known to the skilled person.

[0230] Human antibodies, respectively human antibody constructs, avoid some of the problems associated with antibodies/antibody constructs that possess murine or rat variable and/or constant regions. The presence of such murine or rat derived proteins can lead to the rapid clearance of the antibodies/antibody constructs or can lead to the generation of an immune response against the antibody/antibody construct by a patient. In order to avoid the utilization of murine or rat derived antibodies/antibody constructs, human or fully human antibodies can be generated through the introduction of human antibody function into a rodent so that the rodent produces fully human antibodies.

[0231] The ability to clone and reconstruct megabase-sized human loci in YACs and to introduce them into the mouse germline provides a powerful approach to elucidating the functional components of very large or crudely mapped loci as well as generating useful models of human disease. Furthermore, the utilization of such technology for substitution of mouse loci with their human equivalents could provide unique insights into the expression and regulation of human gene products during development, their communication with other systems, and their involvement in disease induction and progression.

[0232] An important practical application of such a strategy is the “humanization” of the mouse humoral immune system. Introduction of human immunoglobulin (Ig) loci into mice in which the endogenous Ig genes have been inactivated offers the opportunity to study the mechanisms underlying programmed expression and assembly of antibodies as well as their role in B-cell development. Furthermore, such a strategy could provide an ideal source for production of fully human monoclonal antibodies (mAbs)—an important milestone towards fulfilling the promise of antibody therapy in human disease. Fully human antibodies/antibody constructs are expected to minimize the immunogenic and allergic responses intrinsic to mouse or mouse-derivatized mAbs and thus to increase the efficacy and safety of the administered antibodies/antibody constructs. The use of fully human antibodies/antibody constructs can be expected to provide a substantial advantage in the treatment of chronic and recurring human diseases, such as inflammation, autoimmunity, and cancer, which require repeated compound administrations.

[0233] One approach towards this goal was to engineer mouse strains deficient in mouse antibody production with large fragments of the human Ig loci in anticipation that such mice would produce a large repertoire of human antibodies in the absence of mouse antibodies. Large human Ig fragments would preserve the large variable gene diversity as well as the proper regulation of antibody production and expression. By exploiting the mouse machinery for antibody diversification and selection and the lack of immunological tolerance to human proteins, the reproduced human antibody repertoire in these mouse strains should yield high affinity antibodies against any antigen of interest, including human antigens. Using the hybridoma technology, antigen-specific human mAbs with the desired specificity could be readily produced and selected. This general strategy was demonstrated in connection with our generation of the first XenoMouse mouse strains, as published in 1994. (See Green et al. Nature Genetics 7:13-21 (1994)) The XenoMouse strains were engineered with yeast artificial chromosomes (YACs) containing 245 kb and 190 kb-sized germline configuration fragments of the human heavy chain locus and kappa light chain locus, respectively, which contained core variable and constant region sequences. Id. The human Ig containing YACs proved to be compatible with the mouse system for both rearrangement and expression of antibodies and were capable of substituting for the inactivated mouse Ig genes. This was demonstrated by their ability to induce B-cell development, to produce an adult-like human repertoire of fully human antibodies, and to generate antigen-specific human mAbs. These results also suggested that introduction of larger portions of the human Ig loci containing greater numbers of V genes, additional regulatory elements, and human Ig constant regions might recapitulate substantially the full repertoire that is characteristic of the human humoral response to infection and immunization. The work of Green et al. was recently extended to the introduction of greater than approximately 80% of the human antibody repertoire through introduction of megabase sized, germline configuration YAC fragments of the human heavy chain loci and kappa light chain loci, respectively. See Mendez et al. Nature Genetics 15:146-156 (1997) and U.S. patent application Ser. No. 08/759,620, filed Dec. 3, 1996, the disclosures of which are hereby incorporated by reference.

[0234] The production of the XenoMouse mice is further discussed and delineated in U.S. patent application Ser. No. 07/466,008, filed Jan. 12, 1990, Ser. No. 07/610,515, filed Nov. 8, 1990, Ser. No. 07/919,297, filed Jul. 24, 1992, Ser. No. 07/922,649, filed Jul. 30, 1992, filed Ser. No. 08/031,801, filed Mar. 15, 1993, Ser. No. 08/112,848, filed Aug. 27, 1993, Ser. No. 08/234,145, filed Apr. 28, 1994, Ser. No. 08/376,279, filed Jan. 20, 1995, Ser. No. 08/430,938, Apr. 27, 1995, Ser. No. 08/464,584, filed Jun. 5, 1995, Ser. No. 08/464,582, filed Jun. 5, 1995, Ser. No. 08/463,191, filed Jun. 5, 1995, Ser. No. 08/462,837, filed Jun. 5, 1995, Ser. No. 08/486,853, filed Jun. 5, 1995, Ser. No. 08/486,857, filed Jun. 5, 1995, Ser. No. 08/486,859, filed Jun. 5, 1995, Ser. No. 08/462,513, filed Jun. 5, 1995, Ser. No. 08/724,752, filed Oct. 2, 1996, and Ser. No. 08/759,620, filed Dec. 3, 1996 and U.S. Pat. Nos. 6,162,963, 6,150,584, 6,114,598, 6,075,181, and 5,939,598 and Japanese Patent Nos. 3 068 180 B2, 3 068 506 B2, and 3 068 507 B2. See also Mendez et al. Nature Genetics 15:146-156 (1997) and Green and Jakobovits J. Exp. Med. 188:483-495 (1998). See also European Patent No., EP 0 463151 B1, grant published Jun. 12, 1996, International Patent Application No., WO 94/02602, published Feb. 3, 1994, International Patent Application No., WO 96/34096, published Oct. 31, 1996, WO 98/24893, published Jun. 11, 1998, WO 00/76310, published Dec. 21, 2000, WO 03/47336. The disclosures of each of the above-cited patents, applications, and references are hereby incorporated by reference in their entirety.

[0235] In an alternative approach, others, including GenPharm International, Inc., have utilized a “minilocus” approach. In the minilocus approach, an exogenous Ig locus is mimicked through the inclusion of pieces (individual genes) from the Ig locus. Thus, one or more V.sub.H genes, one or more D.sub.H genes, one or more J.sub.H genes, a mu constant region, and a second constant region (preferably a gamma constant region) are formed into a construct for insertion into an animal. This approach is described in U.S. Pat. No. 5,545,807 to Surani et al. and U.S. Pat. Nos. 5,545,806, 5,625,825, 5,625,126, 5,633,425, 5,661,016, 5,770,429, 5,789,650, 5,814,318, 5,877,397, 5,874,299, and 6,255,458 each to Lonberg and Kay, U.S. Pat. Nos. 5,591,669 and 6,023,010 to Krimpenfort and Berns, U.S. Pat. Nos. 5,612,205, 5,721,367, and 5,789,215 to Berns et al., and U.S. Pat. No. 5,643,763 to Choi and Dunn, and GenPharm International U.S. patent application Ser. No. 07/574,748, filed Aug. 29, 1990, Ser. No. 07/575,962, filed Aug. 31, 1990, Ser. No. 07/810,279, filed Dec. 17, 1991, Ser. No. 07/853,408, filed Mar. 18, 1992, Ser. No. 07/904,068, filed Jun. 23, 1992, Ser. No. 07/990,860, filed Dec. 16, 1992, Ser. No. 08/053,131, filed Apr. 26, 1993, Ser. No. 08/096,762, filed Jul. 22, 1993, Ser. No. 08/155,301, filed Nov. 18, 1993, Ser. No. 08/161,739, filed Dec. 3, 1993, Ser. No. 08/165,699, filed Dec. 10, 1993, Ser. No. 08/209,741, filed Mar. 9, 1994, the disclosures of which are hereby incorporated by reference. See also European Patent No. 0 546 073 B 1, International Patent Application Nos. WO 92/03918, WO 92/22645, WO 92/22647, WO 92/22670, WO 93/12227, WO 94/00569, WO 94/25585, WO 96/14436, WO 97/13852, and WO 98/24884 and U.S. Pat. No. 5,981,175, the disclosures of which are hereby incorporated by reference in their entirety. See further Taylor et al., 1992, Chen et al., 1993, Tuaillon et al., 1993, Choi et al., 1993, Lonberg et al., (1994), Taylor et al., (1994), and Tuaillon et al., (1995), Fishwild et al., (1996), the disclosures of which are hereby incorporated by reference in their entirety.

[0236] Kirin has also demonstrated the generation of human antibodies from mice in which, through microcell fusion, large pieces of chromosomes, or entire chromosomes, have been introduced. See European Patent Application Nos. 773 288 and 843 961, the disclosures of which are hereby incorporated by reference. Xenerex Biosciences is developing a technology for the potential generation of human antibodies. In this technology, SCID mice are reconstituted with human lymphatic cells, e.g., B and/or T cells. Mice are then immunized with an antigen and can generate an immune response against the antigen. See U.S. Pat. Nos. 5,476,996, 5,698,767, and 5,958,765.

[0237] Human anti-mouse antibody (HAMA) responses have led the industry to prepare chimeric or otherwise humanized antibodies. While chimeric antibodies have a human constant region and a murine variable region, it is expected that certain human anti-chimeric antibody (HACA) responses will be observed, particularly in chronic or multi-dose utilizations of the antibody. Thus, it would be desirable to provide fully human antibodies against EGFRvIII in order to vitiate concerns and/or effects of HAMA or HACA response.

[0238] Cytotoxicity mediated by CDH19/CD3 bispecific antibody constructs can be measured in various ways. Effector cells can be e.g. stimulated enriched (human) CD8 positive T cells or unstimulated (human) peripheral blood mononuclear cells (PBMC). If the target cells are of macaque origin or express or are transfected with macaque CDH19, the effector cells should also be of macaque origin such as a macaque T cell line, e.g. 4119LnPx. The target cells should express (at least the extracellular domain of) CDH19, e.g. human or macaque CDH19. Target cells can be a cell line (such as CHO) which is stably or transiently transfected with CDH19, e.g. human or macaque CDH19. Alternatively, the target cells can be a CDH19 positive natural expresser cell line, such as the human myeloma cell line CHL-1 or Colo-699. Usually EC50-values are expected to be lower with target cell lines expressing higher levels of CDH19 on the cell surface. The effector to target cell (E:T) ratio is usually about 10:1, but can also vary. Cytotoxic activity of CDH19/CD3 bispecific antibody constructs can be measured in an 51-chromium release assay (incubation time of about 18 hours) or in a in a FACS-based cytotoxicity assay (incubation time of about 48 hours). Modifications of the assay incubation time (cytotoxic reaction) are also possible. Other methods of measuring cytotoxicity are well-known to the skilled person and comprise MTT or MTS assays, ATP-based assays including bioluminescent assays, the sulforhodamine B (SRB) assay, WST assay, clonogenic assay and the ECIS technology.

[0239] The cytotoxic activity mediated by CDH19/CD3 bispecific antibody constructs of the present invention is preferably measured in a cell-based cytotoxicity assay. It is represented by the EC₅₀ value, which corresponds to the half maximal effective concentration (concentration of the antibody construct which induces a cytotoxic response halfway between the baseline and maximum). Preferably, the EC₅₀ value of the CDH19/CD3 bispecific antibody constructs is ≤20.000 pg/ml, more preferably ≤5000 pg/ml, even more preferably ≤1000 pg/ml, even more preferably ≤500 pg/ml, even more preferably ≤350 pg/ml, even more preferably ≤320 pg/ml, even more preferably ≤250 pg/ml, even more preferably ≤100 pg/ml, even more preferably ≤50 pg/ml, even more preferably ≤10 pg/ml, and most preferably ≤5 pg/ml.

[0240] Any of the above given EC₅₀ values can be combined with any one of the indicated scenarios of a cell-based cytotoxicity assay. For example, when (human) CD8 positive T cells or a macaque T cell line are used as effector cells, the EC₅₀ value of the CDH19/CD3 bispecific antibody construct is preferably ≤1000 pg/ml, more preferably ≤500 pg/ml, even more preferably ≤250 pg/ml, even more preferably ≤100 pg/ml, even more preferably ≤50 pg/ml, even more preferably ≤10 pg/ml, and most preferably ≤5 pg/ml. If in this assay the target cells are (human or macaque) CDH19 transfected cells such as CHO cells, the EC₅₀ value of the CDH19/CD3 bispecific antibody construct is preferably ≤150 pg/ml, more preferably ≤100 pg/ml, even more preferably ≤50 pg/ml, even more preferably ≤30 pg/ml, even more preferably ≤10 pg/ml, and most preferably ≤5 pg/ml.

[0241] If the target cells are a CDH19positive natural expresser cell line, then the EC₅₀ value is preferably ≤350 pg/ml, more preferably ≤320 pg/ml, even more preferably ≤250 pg/ml, even more preferably ≤200 pg/ml, even more preferably ≤100 pg/ml, even more preferably ≤150 pg/ml, even more preferably ≤100 pg/ml, and most preferably ≤50 pg/ml, or lower. When (human) PBMCs are used as effector cells, the EC₅₀ value of the CDH19/CD3 bispecific antibody construct is preferably ≤1000 pg/ml, more preferably ≤750 pg/ml, more preferably ≤500 pg/ml, even more preferably ≤350 pg/ml, even more preferably ≤320 pg/ml, even more preferably ≤250 pg/ml, even more preferably ≤100 pg/ml, and most preferably ≤50 pg/ml, or lower.

[0242] The difference in cytotoxic activity between the monomeric and the dimeric isoform of individual CDH19/CD3 bispecific antibody constructs is referred to as “potency gap”. This potency gap can e.g. be calculated as ratio between EC₅₀ values of the molecule's monomeric and dimeric form. Potency gaps of the CDH19/CD3 bispecific antibody constructs of the present invention are preferably ≤5, more preferably 54, even more preferably ≤3, even more preferably ≤2 and most preferably ≤1.

[0243] The antibody construct of the invention is a fusion protein comprising at least two binding domains, with or without peptide linkers (spacer peptides). Among the suitable peptide linkers are those described in U.S. Pat. Nos. 4,751,180 and 4,935,233 or WO 88/09344.

[0244] Another method for preparing oligomeric antibody constuct derivatives involves use of a leucine zipper. Leucine zipper domains are peptides that promote oligomerization of the proteins in which they are found. Leucine zippers were originally identified in several DNA-binding proteins (Landschulz et al., 1988, Science 240:1759), and have since been found in a variety of different proteins. Among the known leucine zippers are naturally occurring peptides and derivatives thereof that dimerize or trimerize. Examples of leucine zipper domains suitable for producing soluble oligomeric proteins are described in PCT application WO 94/10308, and the leucine zipper derived from lung surfactant protein D (SPD) described in Hoppe et al., 1994, FEBS Letters 344:191, hereby incorporated by reference. The use of a modified leucine zipper that allows for stable trimerization of a heterologous protein fused thereto is described in Fanslow et al., 1994, Semin. Immunol. 6:267-78. In one approach, recombinant fusion proteins comprising CDH19 antibody fragment or derivative fused to a leucine zipper peptide are expressed in suitable host cells, and the soluble oligomeric CDH19 antibody fragments or derivatives that form are recovered from the culture supernatant.

[0245] Covalent modifications of antigen binding proteins are included within the scope of this invention, and are generally, but not always, done post-translationally. For example, several types of covalent modifications of the antigen binding protein are introduced into the molecule by reacting specific amino acid residues of the antigen binding protein with an organic derivatizing agent that is capable of reacting with selected side chains or the N- or C-terminal residues.

[0246] Cysteinyl residues most commonly are reacted with α-haloacetates (and corresponding amines), such as chloroacetic acid or chloroacetamide, to give carboxymethyl or carboxyamidomethyl derivatives. Cysteinyl residues also are derivatized by reaction with bromotrifluoroacetone, α-bromo-β-(5-imidozoyl)propionic acid, chloroacetyl phosphate, N-alkylmaleimides, 3-nitro-2-pyridyl disulfide, methyl 2-pyridyl disulfide, p-chloromercuribenzoate, 2-chloromercuri-4-nitrophenol, or chloro-7-nitrobenzo-2-oxa-1,3-diazole.

[0247] Histidyl residues are derivatized by reaction with diethylpyrocarbonate at pH 5.5-7.0 because this agent is relatively specific for the histidyl side chain. Para-bromophenacyl bromide also is useful; the reaction is preferably performed in 0.1M sodium cacodylate at pH 6.0. Lysinyl and amino terminal residues are reacted with succinic or other carboxylic acid anhydrides. Derivatization with these agents has the effect of reversing the charge of the lysinyl residues. Other suitable reagents for derivatizing alpha-amino-containing residues include imidoesters such as methyl picolinimidate; pyridoxal phosphate; pyridoxal; chloroborohydride; trinitrobenzenesulfonic acid; O-methylisourea; 2,4-pentanedione; and transaminase-catalyzed reaction with glyoxylate.

[0248] Arginyl residues are modified by reaction with one or several conventional reagents, among them phenylglyoxal, 2,3-butanedione, 1,2-cyclohexanedione, and ninhydrin. Derivatization of arginine residues requires that the reaction be performed in alkaline conditions because of the high pKa of the guanidine functional group. Furthermore, these reagents may react with the groups of lysine as well as the arginine epsilon-amino group.

[0249] The specific modification of tyrosyl residues may be made, with particular interest in introducing spectral labels into tyrosyl residues by reaction with aromatic diazonium compounds or tetranitromethane. Most commonly, N-acetylimidizole and tetranitromethane are used to form O-acetyl tyrosyl species and 3-nitro derivatives, respectively. Tyrosyl residues are iodinated using ¹²⁵I or ¹³¹I to prepare labeled proteins for use in radioimmunoassay, the chloramine T method described above being suitable.

[0250] Carboxyl side groups (aspartyl or glutamyl) are selectively modified by reaction with carbodiimides (R′—N═C═N—R′), where R and R′ are optionally different alkyl groups, such as 1-cyclohexyl-3-(2-morpholinyl-4-ethyl) carbodiimide or 1-ethyl-3-(4-azonia-4,4-dimethylpentyl) carbodiimide. Furthermore, aspartyl and glutamyl residues are converted to asparaginyl and glutaminyl residues by reaction with ammonium ions.

[0251] Derivatization with bifunctional agents is useful for crosslinking antigen binding proteins to a water-insoluble support matrix or surface for use in a variety of methods. Commonly used crosslinking agents include, e.g., 1,1-bis(diazoacetyl)-2-phenylethane, glutaraldehyde, N-hydroxysuccinimide esters, for example, esters with 4-azidosalicylic acid, homobifunctional imidoesters, including disuccinimidyl esters such as 3,3′-dithiobis(succinimidylpropionate), and bifunctional maleimides such as bis-N-maleimido-1,8-octane. Derivatizing agents such as methyl-3-[(p-azidophenyl)dithio]propioimidate yield photoactivatable intermediates that are capable of forming crosslinks in the presence of light. Alternatively, reactive water-insoluble matrices such as cyanogen bromide-activated carbohydrates and the reactive substrates described in U.S. Pat. Nos. 3,969,287; 3,691,016; 4,195,128; 4,247,642; 4,229,537; and 4,330,440 are employed for protein immobilization.

[0252] Glutaminyl and asparaginyl residues are frequently deamidated to the corresponding glutamyl and aspartyl residues, respectively. Alternatively, these residues are deamidated under mildly acidic conditions. Either form of these residues falls within the scope of this invention.

[0253] Other modifications include hydroxylation of proline and lysine, phosphorylation of hydroxyl groups of seryl or threonyl residues, methylation of the α-amino groups of lysine, arginine, and histidine side chains (T. E. Creighton, Proteins: Structure and Molecular Properties, W. H. Freeman & Co., San Francisco, 1983, pp. 79-86), acetylation of the N-terminal amine, and amidation of any C-terminal carboxyl group.

[0254] Another type of covalent modification of the antigen binding protein included within the scope of this invention comprises altering the glycosylation pattern of the protein. As is known in the art, glycosylation patterns can depend on both the sequence of the protein (e.g., the presence or absence of particular glycosylation amino acid residues, discussed below), or the host cell or organism in which the protein is produced. Particular expression systems are discussed below.

[0255] Glycosylation of polypeptides is typically either N-linked or O-linked. N-linked refers to the attachment of the carbohydrate moiety to the side chain of an asparagine residue. The tri-peptide sequences asparagine-X-serine and asparagine-X-threonine, where X is any amino acid except proline, are the recognition sequences for enzymatic attachment of the carbohydrate moiety to the asparagine side chain. Thus, the presence of either of these tri-peptide sequences in a polypeptide creates a potential glycosylation site. O-linked glycosylation refers to the attachment of one of the sugars N-acetylgalactosamine, galactose, or xylose, to a hydroxyamino acid, most commonly serine or threonine, although 5-hydroxyproline or 5-hydroxylysine may also be used.

[0256] Addition of glycosylation sites to the antigen binding protein is conveniently accomplished by altering the amino acid sequence such that it contains one or more of the above-described tri-peptide sequences (for N-linked glycosylation sites). The alteration may also be made by the addition of, or substitution by, one or more serine or threonine residues to the starting sequence (for O-linked glycosylation sites). For ease, the antigen binding protein amino acid sequence is preferably altered through changes at the DNA level, particularly by mutating the DNA encoding the target polypeptide at preselected bases such that codons are generated that will translate into the desired amino acids.

[0257] Another means of increasing the number of carbohydrate moieties on the antigen binding protein is by chemical or enzymatic coupling of glycosides to the protein. These procedures are advantageous in that they do not require production of the protein in a host cell that has glycosylation capabilities for N- and O-linked glycosylation. Depending on the coupling mode used, the sugar(s) may be attached to (a) arginine and histidine, (b) free carboxyl groups, (c) free sulfhydryl groups such as those of cysteine, (d) free hydroxyl groups such as those of serine, threonine, or hydroxyproline, (e) aromatic residues such as those of phenylalanine, tyrosine, or tryptophan, or (f) the amide group of glutamine. These methods are described in WO 87/05330 published Sep. 11, 1987, and in Aplin and Wriston, 1981, CRC Crit. Rev. Biochem., pp. 259-306.

[0258] Removal of carbohydrate moieties present on the starting antigen binding protein may be accomplished chemically or enzymatically. Chemical deglycosylation requires exposure of the protein to the compound trifluoromethanesulfonic acid, or an equivalent compound. This treatment results in the cleavage of most or all sugars except the linking sugar (N-acetylglucosamine or N-acetylgalactosamine), while leaving the polypeptide intact. Chemical deglycosylation is described by Hakimuddin et al., 1987, Arch. Biochem. Biophys. 259:52 and by Edge et al., 1981, Anal. Biochem. 118:131. Enzymatic cleavage of carbohydrate moieties on polypeptides can be achieved by the use of a variety of endo- and exo-glycosidases as described by Thotakura et al., 1987, Meth. Enzymol. 138:350. Glycosylation at potential glycosylation sites may be prevented by the use of the compound tunicamycin as described by Duskin et al., 1982, J. Biol. Chem. 257:3105. Tunicamycin blocks the formation of protein-N-glycoside linkages.

[0259] Another type of covalent modification of the antigen binding protein comprises linking the antigen binding protein to various non-proteinaceous polymers, including, but not limited to, various polyols such as polyethylene glycol, polypropylene glycol or polyoxyalkylenes, in the manner set forth in U.S. Pat. No. 4,640,835; 4,496,689; 4,301,144; 4,670,417; 4,791,192 or 4,179,337. In addition, as is known in the art, amino acid substitutions may be made in various positions within the antigen binding protein to facilitate the addition of polymers such as PEG.

[0260] In some embodiments, the covalent modification of the antigen binding proteins of the invention comprises the addition of one or more labels.

[0261] The term “labelling group” means any detectable label. Examples of suitable labelling groups include, but are not limited to, the following: radioisotopes or radionuclides (e.g., ³H, ¹⁴C, ¹⁵N, ³⁵S, ⁹⁰Y, ⁹⁹Tc, ¹¹¹In, ¹²⁵I, ¹³¹I), fluorescent groups (e.g., FITC, rhodamine, lanthanide phosphors), enzymatic groups (e.g., horseradish peroxidase, β-galactosidase, luciferase, alkaline phosphatase), chemiluminescent groups, biotinyl groups, or predetermined polypeptide epitopes recognized by a secondary reporter (e.g., leucine zipper pair sequences, binding sites for secondary antibodies, metal binding domains, epitope tags). In some embodiments, the labelling group is coupled to the antigen binding protein via spacer arms of various lengths to reduce potential steric hindrance. Various methods for labelling proteins are known in the art and may be used in performing the present invention.

[0262] In general, labels fall into a variety of classes, depending on the assay in which they are to be detected: a) isotopic labels, which may be radioactive or heavy isotopes; b) magnetic labels (e.g., magnetic particles); c) redox active moieties; d) optical dyes; enzymatic groups (e.g. horseradish peroxidase, β-galactosidase, luciferase, alkaline phosphatase); e) biotinylated groups; and f) predetermined polypeptide epitopes recognized by a secondary reporter (e.g., leucine zipper pair sequences, binding sites for secondary antibodies, metal binding domains, epitope tags, etc.). In some embodiments, the labelling group is coupled to the antigen binding protein via spacer arms of various lengths to reduce potential steric hindrance. Various methods for labelling proteins are known in the art and may be used in performing the present invention.

[0263] Specific labels include optical dyes, including, but not limited to, chromophores, phosphors and fluorophores, with the latter being specific in many instances. Fluorophores can be either “small molecule” fluores, or proteinaceous fluores.

[0264] By “fluorescent label” is meant any molecule that may be detected via its inherent fluorescent properties. Suitable fluorescent labels include, but are not limited to, fluorescein, rhodamine, tetramethylrhodamine, eosin, erythrosin, coumarin, methyl-coumarins, pyrene, Malacite green, stilbene, Lucifer Yellow, Cascade BlueJ, Texas Red, IAEDANS, EDANS, BODIPY FL, LC Red 640, Cy 5, Cy 5.5, LC Red 705, Oregon green, the Alexa-Fluor dyes (Alexa Fluor 350, Alexa Fluor 430, Alexa Fluor 488, Alexa Fluor 546, Alexa Fluor 568, Alexa Fluor 594, Alexa Fluor 633, Alexa Fluor 660, Alexa Fluor 680), Cascade Blue, Cascade Yellow and R-phycoerythrin (PE) (Molecular Probes, Eugene, Oreg.), FITC, Rhodamine, and Texas Red (Pierce, Rockford, Ill.), Cy5, Cy5.5, Cy7 (Amersham Life Science, Pittsburgh, Pa.). Suitable optical dyes, including fluorophores, are described in Molecular Probes Handbook by Richard P. Haugland, hereby expressly incorporated by reference.

[0265] Suitable proteinaceous fluorescent labels also include, but are not limited to, green fluorescent protein, including a Renilla, Ptilosarcus, or Aequorea species of GFP (Chalfie et al., 1994, Science 263:802-805), EGFP (Clontech Laboratories, Inc., Genbank Accession Number U55762), blue fluorescent protein (BFP, Quantum Biotechnologies, Inc. 1801 de Maisonneuve Blvd. West, 8th Floor, Montreal, Quebec, Canada H3H 1J9; Stauber, 1998, Biotechniques 24:462-471; Heim et al., 1996, Curr. Biol. 6:178-182), enhanced yellow fluorescent protein (EYFP, Clontech Laboratories, Inc.), luciferase (Ichiki et al., 1993, J. Immunol. 150:5408-5417), β galactosidase (Nolan et al., 1988, Proc. Natl. Acad. Sci. U.S.A. 85:2603-2607) and Renilla (WO92/15673, WO95/07463, WO98/14605, WO98/26277, WO99/49019, U.S. Pat. Nos. 5,292,658, 5,418,155, 5,683,888, 5,741,668, 5,777,079, 5,804,387, 5,874,304, 5,876,995, 5,925,558). All of the above-cited references are expressly incorporated herein by reference.

[0266] The antibody construct of the invention may also comprise additional domains, which e.g. are helpful in the isolation of the molecule or relate to an adapted pharmacokinetic profile of the molecule.

[0267] Domains helpful for the isolation of an antibody construct may be elected from peptide motives or secondarily introduced moieties, which can be captured in an isolation method, e.g. an isolation column. A non-limiting embodiments of such additional domains comprise peptide motives known as Myc-tag, HAT-tag, HA-tag, TAP-tag, GST-tag, chitin binding domain (CBD-tag), maltose binding protein (MBP-tag), Flag-tag, Strep-tag and variants thereof (e.g. StrepII-tag) and His-tag. All herein disclosed antibody constructs characterized by the identified CDRs are preferred to comprise a His-tag domain, which is generally known as a repeat of consecutive His residues in the amino acid sequence of a molecule, preferably of six His residues.

[0268] As described in appended example 2 a broad number of CDH19 specific binder has been characterized with respect to identified binding characteristics and those binders were grouped into five different bins, which refers to five different subgroups of CDH19 specific binding domains. Accordingly, in one embodiment the antibody construct of the invention the first binding domain comprises a VH region comprising CDR-H1, CDR-H2 and CDR-H3 and a VL region comprising CDR-L1, CDR-L2 and CDR-L3 selected from the group consisting of:
[0269] (a) CDR-H1 as depicted in SEQ ID NO: 52, CDR-H2 as depicted in SEQ ID NO: 53, CDR-H3 as depicted in SEQ ID NO: 54, CDR-L1 as depicted in SEQ ID NO: 220, CDR-L2 as depicted in SEQ ID NO: 221 and CDR-L3 as depicted in SEQ ID NO: 222, CDR-H1 as depicted in SEQ ID NO: 82, CDR-H2 as depicted in SEQ ID NO: 83, CDR-H3 as depicted in SEQ ID NO: 84, CDR-L1 as depicted in SEQ ID NO: 250, CDR-L2 as depicted in SEQ ID NO: 251 and CDR-L3 as depicted in SEQ ID NO: 252, CDR-H1 as depicted in SEQ ID NO: 82, CDR-H2 as depicted in SEQ ID NO: 83, CDR-H3 as depicted in SEQ ID NO: 84, CDR-L1 as depicted in SEQ ID NO: 250, CDR-L2 as depicted in SEQ ID NO: 251 and CDR-L3 as depicted in SEQ ID NO: 927, CDR-H1 as depicted in SEQ ID NO: 82, CDR-H2 as depicted in SEQ ID NO: 83, CDR-H3 as depicted in SEQ ID NO: 909, CDR-L1 as depicted in SEQ ID NO: 250, CDR-L2 as depicted in SEQ ID NO: 251 and CDR-L3 as depicted in SEQ ID NO: 927, CDR-H1 as depicted in SEQ ID NO: 52, CDR-H2 as depicted in SEQ ID NO: 53, CDR-H3 as depicted in SEQ ID NO: 54, CDR-L1 as depicted in SEQ ID NO: 220, CDR-L2 as depicted in SEQ ID NO: 221 and CDR-L3 as depicted in SEQ ID NO: 926, CDR-H1 as depicted in SEQ ID NO: 52, CDR-H2 as depicted in SEQ ID NO: 53, CDR-H3 as depicted in SEQ ID NO: 904, CDR-L1 as depicted in SEQ ID NO: 220, CDR-L2 as depicted in SEQ ID NO: 221 and CDR-L3 as depicted in SEQ ID NO: 926,
   [0270] CDR-H1 as depicted in SEQ ID NO: 1126, CDR-H2 as depicted in SEQ ID NO: 1127, CDR-H3 as depicted in SEQ ID NO: 1128, CDR-L1 as depicted in SEQ ID NO: 1129, CDR-L2 as depicted in SEQ ID NO: 1130 and CDR-L3 as depicted in SEQ ID NO: 1131,
   [0271] CDR-H1 as depicted in SEQ ID NO: 1165, CDR-H2 as depicted in SEQ ID NO: 1166, CDR-H3 as depicted in SEQ ID NO: 1167, CDR-L1 as depicted in SEQ ID NO: 1168, CDR-L2 as depicted in SEQ ID NO: 1169 and CDR-L3 as depicted in SEQ ID NO: 1170,
   [0272] CDR-H1 as depicted in SEQ ID NO: 1334, CDR-H2 as depicted in SEQ ID NO: 1335, CDR-H3 as depicted in SEQ ID NO: 1336, CDR-L1 as depicted in SEQ ID NO: 1337, CDR-L2 as depicted in SEQ ID NO: 1338 and CDR-L3 as depicted in SEQ ID NO: 1339,
   [0273] CDR-H1 as depicted in SEQ ID NO: 1347, CDR-H2 as depicted in SEQ ID NO: 1348, CDR-H3 as depicted in SEQ ID NO: 1349, CDR-L1 as depicted in SEQ ID NO: 1350, CDR-L2 as depicted in SEQ ID NO: 1351 and CDR-L3 as depicted in SEQ ID NO: 1352, and
   [0274] CDR-H1 as depicted in SEQ ID NO: 1360 CDR-H2 as depicted in SEQ ID NO: 1361, CDR-H3 as depicted in SEQ ID NO: 1362, CDR-L1 as depicted in SEQ ID NO: 1363, CDR-L2 as depicted in SEQ ID NO: 1364 and CDR-L3 as depicted in SEQ ID NO: 1365,
   [0275] CDR-H1 as depicted in SEQ ID NO: 1425 CDR-H2 as depicted in SEQ ID NO: 1426, CDR-H3 as depicted in SEQ ID NO: 1427, CDR-L1 as depicted in SEQ ID NO: 1428, CDR-L2 as depicted in SEQ ID NO: 1429 and CDR-L3 as depicted in SEQ ID NO: 1430,
   [0276] CDR-H1 as depicted in SEQ ID NO: 1438 CDR-H2 as depicted in SEQ ID NO: 1439, CDR-H3 as depicted in SEQ ID NO: 1440, CDR-L1 as depicted in SEQ ID NO: 1441, CDR-L2 as depicted in SEQ ID NO: 1442 and CDR-L3 as depicted in SEQ ID NO: 1443;
   [0277] which all characterize binding domains for CDH19 grouped into bin 1;
[0278] (b) CDR-H1 as depicted in SEQ ID NO: 124, CDR-H2 as depicted in SEQ ID NO: 125, CDR-H3 as depicted in SEQ ID NO: 126, CDR-L1 as depicted in SEQ ID NO: 292, CDR-L2 as depicted in SEQ ID NO: 293 and CDR-L3 as depicted in SEQ ID NO: 294, CDR-H1 as depicted in SEQ ID NO: 130, CDR-H2 as depicted in SEQ ID NO: 131, CDR-H3 as depicted in SEQ ID NO: 132, CDR-L1 as depicted in SEQ ID NO: 298, CDR-L2 as depicted in SEQ ID NO: 299 and CDR-L3 as depicted in SEQ ID NO: 300, CDR-H1 as depicted in SEQ ID NO: 136, CDR-H2 as depicted in SEQ ID NO: 137, CDR-H3 as depicted in SEQ ID NO: 138, CDR-L1 as depicted in SEQ ID NO: 304, CDR-L2 as depicted in SEQ ID NO: 305 and CDR-L3 as depicted in SEQ ID NO: 306, CDR-H1 as depicted in SEQ ID NO: 142, CDR-H2 as depicted in SEQ ID NO: 143, CDR-H3 as depicted in SEQ ID NO: 144, CDR-L1 as depicted in SEQ ID NO: 310, CDR-L2 as depicted in SEQ ID NO: 311 and CDR-L3 as depicted in SEQ ID NO: 312, CDR-H1 as depicted in SEQ ID NO: 148, CDR-H2 as depicted in SEQ ID NO: 149, CDR-H3 as depicted in SEQ ID NO: 150, CDR-L1 as depicted in SEQ ID NO: 316, CDR-L2 as depicted in SEQ ID NO: 317 and CDR-L3 as depicted in SEQ ID NO: 318, CDR-H1 as depicted in SEQ ID NO: 166, CDR-H2 as depicted in SEQ ID NO: 167, CDR-H3 as depicted in SEQ ID NO: 168, CDR-L1 as depicted in SEQ ID NO: 334, CDR-L2 as depicted in SEQ ID NO: 335 and CDR-L3 as depicted in SEQ ID NO: 336, CDR-H1 as depicted in SEQ ID NO: 124, CDR-H2 as depicted in SEQ ID NO: 125, CDR-H3 as depicted in SEQ ID NO: 915, CDR-L1 as depicted in SEQ ID NO: 292, CDR-L2 as depicted in SEQ ID NO: 293 and CDR-L3 as depicted in SEQ ID NO: 294, CDR-H1 as depicted in SEQ ID NO: 124, CDR-H2 as depicted in SEQ ID NO: 125, CDR-H3 as depicted in SEQ ID NO: 915, CDR-L1 as depicted in SEQ ID NO: 292, CDR-L2 as depicted in SEQ ID NO: 293 and CDR-L3 as depicted in SEQ ID NO: 928, CDR-H1 as depicted in SEQ ID NO: 124, CDR-H2 as depicted in SEQ ID NO: 125, CDR-H3 as depicted in SEQ ID NO: 915, CDR-L1 as depicted in SEQ ID NO: 292, CDR-L2 as depicted in SEQ ID NO: 293 and CDR-L3 as depicted in SEQ ID NO: 929, CDR-H1 as depicted in SEQ ID NO: 166, CDR-H2 as depicted in SEQ ID NO: 167, CDR-H3 as depicted in SEQ ID NO: 168, CDR-L1 as depicted in SEQ ID NO: 334, CDR-L2 as depicted in SEQ ID NO: 335 and CDR-L3 as depicted in SEQ ID NO: 336, CDR-H1 as depicted in SEQ ID NO: 166, CDR-H2 as depicted in SEQ ID NO: 167, CDR-H3 as depicted in SEQ ID NO: 168, CDR-L1 as depicted in SEQ ID NO: 334, CDR-L2 as depicted in SEQ ID NO: 335 and CDR-L3 as depicted in SEQ ID NO: 942, CDR-H1 as depicted in SEQ ID NO: 166, CDR-H2 as depicted in SEQ ID NO: 167, CDR-H3 as depicted in SEQ ID NO: 168, CDR-L1 as depicted in SEQ ID NO: 334, CDR-L2 as depicted in SEQ ID NO: 335 and CDR-L3 as depicted in SEQ ID NO: 943, CDR-H1 as depicted in SEQ ID NO: 148, CDR-H2 as depicted in SEQ ID NO: 149, CDR-H3 as depicted in SEQ ID NO: 150, CDR-L1 as depicted in SEQ ID NO: 316, CDR-L2 as depicted in SEQ ID NO: 317 and CDR-L3 as depicted in SEQ ID NO: 318, CDR-H1 as depicted in SEQ ID NO: 148, CDR-H2 as depicted in SEQ ID NO: 149, CDR-H3 as depicted in SEQ ID NO: 150, CDR-L1 as depicted in SEQ ID NO: 316, CDR-L2 as depicted in SEQ ID NO: 317 and CDR-L3 as depicted in SEQ ID NO: 937, CDR-H1 as depicted in SEQ ID NO: 148, CDR-H2 as depicted in SEQ ID NO: 149, CDR-H3 as depicted in SEQ ID NO: 150, CDR-L1 as depicted in SEQ ID NO: 316, CDR-L2 as depicted in SEQ ID NO: 317 and CDR-L3 as depicted in SEQ ID NO: 938, CDR-H1 as depicted in SEQ ID NO: 148, CDR-H2 as depicted in SEQ ID NO: 149, CDR-H3 as depicted in SEQ ID NO: 919, CDR-L1 as depicted in SEQ ID NO: 316, CDR-L2 as depicted in SEQ ID NO: 317 and CDR-L3 as depicted in SEQ ID NO: 938, CDR-H1 as depicted in SEQ ID NO: 142, CDR-H2 as depicted in SEQ ID NO: 143, CDR-H3 as depicted in SEQ ID NO: 144, CDR-L1 as depicted in SEQ ID NO: 310, CDR-L2 as depicted in SEQ ID NO: 311 and CDR-L3 as depicted in SEQ ID NO: 935, CDR-H1 as depicted in SEQ ID NO: 142, CDR-H2 as depicted in SEQ ID NO: 143, CDR-H3 as depicted in SEQ ID NO: 918, CDR-L1 as depicted in SEQ ID NO: 310, CDR-L2 as depicted in SEQ ID NO: 311 and CDR-L3 as depicted in SEQ ID NO: 935, CDR-H1 as depicted in SEQ ID NO: 142, CDR-H2 as depicted in SEQ ID NO: 143, CDR-H3 as depicted in SEQ ID NO: 918, CDR-L1 as depicted in SEQ ID NO: 310, CDR-L2 as depicted in SEQ ID NO: 311 and CDR-L3 as depicted in SEQ ID NO: 936, CDR-H1 as depicted in SEQ ID NO: 136, CDR-H2 as depicted in SEQ ID NO: 137, CDR-H3 as depicted in SEQ ID NO: 138, CDR-L1 as depicted in SEQ ID NO: 304, CDR-L2 as depicted in SEQ ID NO: 305 and CDR-L3 as depicted in SEQ ID NO: 933, CDR-H1 as depicted in SEQ ID NO: 136, CDR-H2 as depicted in SEQ ID NO: 137, CDR-H3 as depicted in SEQ ID NO: 917, CDR-L1 as depicted in SEQ ID NO: 304, CDR-L2 as depicted in SEQ ID NO: 305 and CDR-L3 as depicted in SEQ ID NO: 934, CDR-H1 as depicted in SEQ ID NO: 130, CDR-H2 as depicted in SEQ ID NO: 131, CDR-H3 as depicted in SEQ ID NO: 132, CDR-L1 as depicted in SEQ ID NO: 298, CDR-L2 as depicted in SEQ ID NO: 299 and CDR-L3 as depicted in SEQ ID NO: 930, CDR-H1 as depicted in SEQ ID NO: 130, CDR-H2 as depicted in SEQ ID NO: 131, CDR-H3 as depicted in SEQ ID NO: 916, CDR-L1 as depicted in SEQ ID NO: 298, CDR-L2 as depicted in SEQ ID NO: 299 and CDR-L3 as depicted in SEQ ID NO: 931, CDR-H1 as depicted in SEQ ID NO: 130, CDR-H2 as depicted in SEQ ID NO: 131, CDR-H3 as depicted in SEQ ID NO: 916, CDR-L1 as depicted in SEQ ID NO: 298, CDR-L2 as depicted in SEQ ID NO: 299 and CDR-L3 as depicted in SEQ ID NO: 932, CDR-H1 as depicted in SEQ ID NO: 1009, CDR-H2 as depicted in SEQ ID NO: 1010, CDR-H3 as depicted in SEQ ID NO: 1011, CDR-L1 as depicted in SEQ ID NO: 1012, CDR-L2 as depicted in SEQ ID NO: 1013 and CDR-L3 as depicted in SEQ ID NO: 1014,
   [0279] CDR-H1 as depicted in SEQ ID NO: 1022, CDR-H2 as depicted in SEQ ID NO: 1023, CDR-H3 as depicted in SEQ ID NO: 1024, CDR-L1 as depicted in SEQ ID NO: 1025, CDR-L2 as depicted in SEQ ID NO: 1026 and CDR-L3 as depicted in SEQ ID NO: 1027, CDR-H1 as depicted in SEQ ID NO: 1035, CDR-H2 as depicted in SEQ ID NO: 1036, CDR-H3 as depicted in SEQ ID NO: 1037, CDR-L1 as depicted in SEQ ID NO: 1038, CDR-L2 as depicted in SEQ ID NO: 1039 and CDR-L3 as depicted in SEQ ID NO: 1040,
   [0280] CDR-H1 as depicted in SEQ ID NO: 1074, CDR-H2 as depicted in SEQ ID NO: 1075, CDR-H3 as depicted in SEQ ID NO: 1076, CDR-L1 as depicted in SEQ ID NO: 1077, CDR-L2 as depicted in SEQ ID NO: 1078 and CDR-L3 as depicted in SEQ ID NO: 1079,
   [0281] CDR-H1 as depicted in SEQ ID NO: 1100, CDR-H2 as depicted in SEQ ID NO: 1101, CDR-H3 as depicted in SEQ ID NO: 1102, CDR-L1 as depicted in SEQ ID NO: 1103, CDR-L2 as depicted in SEQ ID NO: 1104 and CDR-L3 as depicted in SEQ ID NO: 1105,
   [0282] CDR-H1 as depicted in SEQ ID NO: 1113, CDR-H2 as depicted in SEQ ID NO: 1114, CDR-H3 as depicted in SEQ ID NO: 1115, CDR-L1 as depicted in SEQ ID NO: 1116, CDR-L2 as depicted in SEQ ID NO: 1117 and CDR-L3 as depicted in SEQ ID NO: 1118,
   [0283] CDR-H1 as depicted in SEQ ID NO: 1243, CDR-H2 as depicted in SEQ ID NO: 1244, CDR-H3 as depicted in SEQ ID NO: 1245, CDR-L1 as depicted in SEQ ID NO: 1246, CDR-L2 as depicted in SEQ ID NO: 1247 and CDR-L3 as depicted in SEQ ID NO: 1248,
   [0284] CDR-H1 as depicted in SEQ ID NO: 1256, CDR-H2 as depicted in SEQ ID NO: 1257, CDR-H3 as depicted in SEQ ID NO: 1258, CDR-L1 as depicted in SEQ ID NO: 1259, CDR-L2 as depicted in SEQ ID NO: 1260 and CDR-L3 as depicted in SEQ ID NO: 1261,
   [0285] CDR-H1 as depicted in SEQ ID NO: 1269, CDR-H2 as depicted in SEQ ID NO: 1270, CDR-H3 as depicted in SEQ ID NO: 1271, CDR-L1 as depicted in SEQ ID NO: 1272, CDR-L2 as depicted in SEQ ID NO: 1273 and CDR-L3 as depicted in SEQ ID NO: 1274,
   [0286] CDR-H1 as depicted in SEQ ID NO: 1282, CDR-H2 as depicted in SEQ ID NO: 1283, CDR-H3 as depicted in SEQ ID NO: 1284, CDR-L1 as depicted in SEQ ID NO: 1285, CDR-L2 as depicted in SEQ ID NO: 1286 and CDR-L3 as depicted in SEQ ID NO: 1287, and
   [0287] CDR-H1 as depicted in SEQ ID NO: 1295, CDR-H2 as depicted in SEQ ID NO: 1296, CDR-H3 as depicted in SEQ ID NO: 1297, CDR-L1 as depicted in SEQ ID NO: 1298, CDR-L2 as depicted in SEQ ID NO: 1299 and CDR-L3 as depicted in SEQ ID NO: 1300;
   [0288] which all characterize binding domains for CDH19 grouped into bin 2;
[0289] (c) CDR-H1 as depicted in SEQ ID NO: 94, CDR-H2 as depicted in SEQ ID NO: 95, CDR-H3 as depicted in SEQ ID NO: 96, CDR-L1 as depicted in SEQ ID NO: 262, CDR-L2 as depicted in SEQ ID NO: 263 and CDR-L3 as depicted in SEQ ID NO: 264, CDR-H1 as depicted in SEQ ID NO: 100, CDR-H2 as depicted in SEQ ID NO: 101, CDR-H3 as depicted in SEQ ID NO: 102, CDR-L1 as depicted in SEQ ID NO: 268, CDR-L2 as depicted in SEQ ID NO: 269 and CDR-L3 as depicted in SEQ ID NO: 270, CDR-H1 as depicted in SEQ ID NO: 118, CDR-H2 as depicted in SEQ ID NO: 119, CDR-H3 as depicted in SEQ ID NO: 120, CDR-L1 as depicted in SEQ ID NO: 286, CDR-L2 as depicted in SEQ ID NO: 287 and CDR-L3 as depicted in SEQ ID NO: 288, CDR-H1 as depicted in SEQ ID NO: 154, CDR-H2 as depicted in SEQ ID NO: 155, CDR-H3 as depicted in SEQ ID NO: 156, CDR-L1 as depicted in SEQ ID NO: 322, CDR-L2 as depicted in SEQ ID NO: 323 and CDR-L3 as depicted in SEQ ID NO: 324, CDR-H1 as depicted in SEQ ID NO: 100, CDR-H2 as depicted in SEQ ID NO: 101, CDR-H3 as depicted in SEQ ID NO: 912, CDR-L1 as depicted in SEQ ID NO: 268, CDR-L2 as depicted in SEQ ID NO: 269 and CDR-L3 as depicted in SEQ ID NO: 270, CDR-H1 as depicted in SEQ ID NO: 100, CDR-H2 as depicted in SEQ ID NO: 101, CDR-H3 as depicted in SEQ ID NO: 913, CDR-L1 as depicted in SEQ ID NO: 268, CDR-L2 as depicted in SEQ ID NO: 269 and CDR-L3 as depicted in SEQ ID NO: 270, CDR-H1 as depicted in SEQ ID NO: 94, CDR-H2 as depicted in SEQ ID NO: 95, CDR-H3 as depicted in SEQ ID NO: 910, CDR-L1 as depicted in SEQ ID NO: 262, CDR-L2 as depicted in SEQ ID NO: 263 and CDR-L3 as depicted in SEQ ID NO: 264, CDR-H1 as depicted in SEQ ID NO: 94, CDR-H2 as depicted in SEQ ID NO: 95, CDR-H3 as depicted in SEQ ID NO: 911, CDR-L1 as depicted in SEQ ID NO: 262, CDR-L2 as depicted in SEQ ID NO: 263 and CDR-L3 as depicted in SEQ ID NO: 264, CDR-H1 as depicted in SEQ ID NO: 118, CDR-H2 as depicted in SEQ ID NO: 119, CDR-H3 as depicted in SEQ ID NO: 120, CDR-L1 as depicted in SEQ ID NO: 286, CDR-L2 as depicted in SEQ ID NO: 287 and CDR-L3 as depicted in SEQ ID NO: 288, CDR-H1 as depicted in SEQ ID NO: 118, CDR-H2 as depicted in SEQ ID NO: 914, CDR-H3 as depicted in SEQ ID NO: 120, CDR-L1 as depicted in SEQ ID NO: 286, CDR-L2 as depicted in SEQ ID NO: 287 and CDR-L3 as depicted in SEQ ID NO: 288, CDR-H1 as depicted in SEQ ID NO: 154, CDR-H2 as depicted in SEQ ID NO: 155, CDR-H3 as depicted in SEQ ID NO: 920, CDR-L1 as depicted in SEQ ID NO: 322, CDR-L2 as depicted in SEQ ID NO: 323 and CDR-L3 as depicted in SEQ ID NO: 324, CDR-H1 as depicted in SEQ ID NO: 996, CDR-H2 as depicted in SEQ ID NO: 997, CDR-H3 as depicted in SEQ ID NO: 998, CDR-L1 as depicted in SEQ ID NO: 999, CDR-L2 as depicted in SEQ ID NO: 1000 and CDR-L3 as depicted in SEQ ID NO: 1001,
   [0290] CDR-H1 as depicted in SEQ ID NO: 1048, CDR-H2 as depicted in SEQ ID NO: 1049, CDR-H3 as depicted in SEQ ID NO: 1050, CDR-L1 as depicted in SEQ ID NO: 1051, CDR-L2 as depicted in SEQ ID NO: 1052 and CDR-L3 as depicted in SEQ ID NO: 1053, and
   [0291] CDR-H1 as depicted in SEQ ID NO: 1087, CDR-H2 as depicted in SEQ ID NO: 1088, CDR-H3 as depicted in SEQ ID NO: 1089, CDR-L1 as depicted in SEQ ID NO: 1090, CDR-L2 as depicted in SEQ ID NO: 1091 and CDR-L3 as depicted in SEQ ID NO: 1092;
   [0292] which all characterize binding domains for CDH19 grouped into bin 3;
[0293] (d) CDR-H1 as depicted in SEQ ID NO: 4, CDR-H2 as depicted in SEQ ID NO: 5, CDR-H3 as depicted in SEQ ID NO: 6, CDR-L1 as depicted in SEQ ID NO: 172, CDR-L2 as depicted in SEQ ID NO: 173 and CDR-L3 as depicted in SEQ ID NO: 174, CDR-H1 as depicted in SEQ ID NO: 10, CDR-H2 as depicted in SEQ ID NO: 11, CDR-H3 as depicted in SEQ ID NO: 12, CDR-L1 as depicted in SEQ ID NO: 178, CDR-L2 as depicted in SEQ ID NO: 179 and CDR-L3 as depicted in SEQ ID NO: 180, CDR-H1 as depicted in SEQ ID NO: 28, CDR-H2 as depicted in SEQ ID NO: 29, CDR-H3 as depicted in SEQ ID NO: 30, CDR-L1 as depicted in SEQ ID NO: 196, CDR-L2 as depicted in SEQ ID NO: 197 and CDR-L3 as depicted in SEQ ID NO: 198, CDR-H1 as depicted in SEQ ID NO: 34, CDR-H2 as depicted in SEQ ID NO: 35, CDR-H3 as depicted in SEQ ID NO: 36, CDR-L1 as depicted in SEQ ID NO: 202, CDR-L2 as depicted in SEQ ID NO: 203 and CDR-L3 as depicted in SEQ ID NO: 204, CDR-H1 as depicted in SEQ ID NO: 46, CDR-H2 as depicted in SEQ ID NO: 47, CDR-H3 as depicted in SEQ ID NO: 48, CDR-L1 as depicted in SEQ ID NO: 214, CDR-L2 as depicted in SEQ ID NO: 215 and CDR-L3 as depicted in SEQ ID NO: 216, CDR-H1 as depicted in SEQ ID NO: 58, CDR-H2 as depicted in SEQ ID NO: 59, CDR-H3 as depicted in SEQ ID NO: 60, CDR-L1 as depicted in SEQ ID NO: 226, CDR-L2 as depicted in SEQ ID NO: 227 and CDR-L3 as depicted in SEQ ID NO: 228, CDR-H1 as depicted in SEQ ID NO: 64, CDR-H2 as depicted in SEQ ID NO: 65, CDR-H3 as depicted in SEQ ID NO: 66, CDR-L1 as depicted in SEQ ID NO: 232, CDR-L2 as depicted in SEQ ID NO: 233 and CDR-L3 as depicted in SEQ ID NO: 234, CDR-H1 as depicted in SEQ ID NO: 70, CDR-H2 as depicted in SEQ ID NO: 71, CDR-H3 as depicted in SEQ ID NO: 72, CDR-L1 as depicted in SEQ ID NO: 238, CDR-L2 as depicted in SEQ ID NO: 239 and CDR-L3 as depicted in SEQ ID NO: 240, CDR-H1 as depicted in SEQ ID NO: 160, CDR-H2 as depicted in SEQ ID NO: 161, CDR-H3 as depicted in SEQ ID NO: 162, CDR-L1 as depicted in SEQ ID NO: 328, CDR-L2 as depicted in SEQ ID NO: 329 and CDR-L3 as depicted in SEQ ID NO: 330, CDR-H1 as depicted in SEQ ID NO: 46, CDR-H2 as depicted in SEQ ID NO: 47, CDR-H3 as depicted in SEQ ID NO: 48, CDR-L1 as depicted in SEQ ID NO: 924, CDR-L2 as depicted in SEQ ID NO: 215 and CDR-L3 as depicted in SEQ ID NO: 216, CDR-H1 as depicted in SEQ ID NO: 46, CDR-H2 as depicted in SEQ ID NO: 47, CDR-H3 as depicted in SEQ ID NO: 902, CDR-L1 as depicted in SEQ ID NO: 924, CDR-L2 as depicted in SEQ ID NO: 215 and CDR-L3 as depicted in SEQ ID NO: 216, CDR-H1 as depicted in SEQ ID NO: 46, CDR-H2 as depicted in SEQ ID NO: 47, CDR-H3 as depicted in SEQ ID NO: 903, CDR-L1 as depicted in SEQ ID NO: 924, CDR-L2 as depicted in SEQ ID NO: 215 and CDR-L3 as depicted in SEQ ID NO: 216, CDR-H1 as depicted in SEQ ID NO: 46, CDR-H2 as depicted in SEQ ID NO: 47, CDR-H3 as depicted in SEQ ID NO: 48, CDR-L1 as depicted in SEQ ID NO: 925, CDR-L2 as depicted in SEQ ID NO: 215 and CDR-L3 as depicted in SEQ ID NO: 216, CDR-H1 as depicted in SEQ ID NO: 70, CDR-H2 as depicted in SEQ ID NO: 907, CDR-H3 as depicted in SEQ ID NO: 72, CDR-L1 as depicted in SEQ ID NO: 238, CDR-L2 as depicted in SEQ ID NO: 239 and CDR-L3 as depicted in SEQ ID NO: 240, CDR-H1 as depicted in SEQ ID NO: 70, CDR-H2 as depicted in SEQ ID NO: 907, CDR-H3 as depicted in SEQ ID NO: 908, CDR-L1 as depicted in SEQ ID NO: 238, CDR-L2 as depicted in SEQ ID NO: 239 and CDR-L3 as depicted in SEQ ID NO: 240, CDR-H1 as depicted in SEQ ID NO: 28, CDR-H2 as depicted in SEQ ID NO: 901, CDR-H3 as depicted in SEQ ID NO: 30, CDR-L1 as depicted in SEQ ID NO: 922, CDR-L2 as depicted in SEQ ID NO: 197 and CDR-L3 as depicted in SEQ ID NO: 923, CDR-H1 as depicted in SEQ ID NO: 58, CDR-H2 as depicted in SEQ ID NO: 905, CDR-H3 as depicted in SEQ ID NO: 906, CDR-L1 as depicted in SEQ ID NO: 226, CDR-L2 as depicted in SEQ ID NO: 227 and CDR-L3 as depicted in SEQ ID NO: 228, CDR-H1 as depicted in SEQ ID NO: 58, CDR-H2 as depicted in SEQ ID NO: 905, CDR-H3 as depicted in SEQ ID NO: 60, CDR-L1 as depicted in SEQ ID NO: 226, CDR-L2 as depicted in SEQ ID NO: 227 and CDR-L3 as depicted in SEQ ID NO: 228, CDR-H1 as depicted in SEQ ID NO: 160, CDR-H2 as depicted in SEQ ID NO: 161, CDR-H3 as depicted in SEQ ID NO: 162, CDR-L1 as depicted in SEQ ID NO: 939, CDR-L2 as depicted in SEQ ID NO: 329 and CDR-L3 as depicted in SEQ ID NO: 330, CDR-H1 as depicted in SEQ ID NO: 160, CDR-H2 as depicted in SEQ ID NO: 921, CDR-H3 as depicted in SEQ ID NO: 162, CDR-L1 as depicted in SEQ ID NO: 939, CDR-L2 as depicted in SEQ ID NO: 329 and CDR-L3 as depicted in SEQ ID NO: 940, CDR-H1 as depicted in SEQ ID NO: 160, CDR-H2 as depicted in SEQ ID NO: 161, CDR-H3 as depicted in SEQ ID NO: 162, CDR-L1 as depicted in SEQ ID NO: 941, CDR-L2 as depicted in SEQ ID NO: 329 and CDR-L3 as depicted in SEQ ID NO: 330, CDR-H1 as depicted in SEQ ID NO: 28, CDR-H2 as depicted in SEQ ID NO: 29, CDR-H3 as depicted in SEQ ID NO: 30, CDR-L1 as depicted in SEQ ID NO: 196, CDR-L2 as depicted in SEQ ID NO: 197 and CDR-L3 as depicted in SEQ ID NO: 923, CDR-H1 as depicted in SEQ ID NO: 28, CDR-H2 as depicted in SEQ ID NO: 29, CDR-H3 as depicted in SEQ ID NO: 30, CDR-L1 as depicted in SEQ ID NO: 922, CDR-L2 as depicted in SEQ ID NO: 197 and CDR-L3 as depicted in SEQ ID NO: 923, CDR-H1 as depicted in SEQ ID NO: 28, CDR-H2 as depicted in SEQ ID NO: 901, CDR-H3 as depicted in SEQ ID NO: 30, CDR-L1 as depicted in SEQ ID NO: 922, CDR-L2 as depicted in SEQ ID NO: 197 and CDR-L3 as depicted in SEQ ID NO: 923, CDR-H1 as depicted in SEQ ID NO: 28, CDR-H2 as depicted in SEQ ID NO: 29, CDR-H3 as depicted in SEQ ID NO: 30, CDR-L1 as depicted in SEQ ID NO: 939, CDR-L2 as depicted in SEQ ID NO: 329 and CDR-L3 as depicted in SEQ ID NO: 330, CDR-H1 as depicted in SEQ ID NO: 970, CDR-H2 as depicted in SEQ ID NO: 971, CDR-H3 as depicted in SEQ ID NO: 972, CDR-L1 as depicted in SEQ ID NO: 973, CDR-L2 as depicted in SEQ ID NO: 974 and CDR-L3 as depicted in SEQ ID NO: 975, CDR-H1 as depicted in SEQ ID NO: 1061, CDR-H2 as depicted in SEQ ID NO: 1062, CDR-H3 as depicted in SEQ ID NO: 1063, CDR-L1 as depicted in SEQ ID NO: 1064, CDR-L2 as depicted in SEQ ID NO: 1065 and CDR-L3 as depicted in SEQ ID NO: 1066,
   [0294] CDR-H1 as depicted in SEQ ID NO: 1139, CDR-H2 as depicted in SEQ ID NO: 1140, CDR-H3 as depicted in SEQ ID NO: 1141, CDR-L1 as depicted in SEQ ID NO: 1142, CDR-L2 as depicted in SEQ ID NO: 1143 and CDR-L3 as depicted in SEQ ID NO: 1144,
   [0295] CDR-H1 as depicted in SEQ ID NO: 1152, CDR-H2 as depicted in SEQ ID NO: 1153, CDR-H3 as depicted in SEQ ID NO: 1154, CDR-L1 as depicted in SEQ ID NO: 1155, CDR-L2 as depicted in SEQ ID NO: 1156 and CDR-L3 as depicted in SEQ ID NO: 1157,
   [0296] CDR-H1 as depicted in SEQ ID NO: 1178, CDR-H2 as depicted in SEQ ID NO: 1179, CDR-H3 as depicted in SEQ ID NO: 1180, CDR-L1 as depicted in SEQ ID NO: 1181, CDR-L2 as depicted in SEQ ID NO: 1182 and CDR-L3 as depicted in SEQ ID NO: 1183,
   [0297] CDR-H1 as depicted in SEQ ID NO: 1191, CDR-H2 as depicted in SEQ ID NO: 1192, CDR-H3 as depicted in SEQ ID NO: 1193, CDR-L1 as depicted in SEQ ID NO: 1194, CDR-L2 as depicted in SEQ ID NO: 1195 and CDR-L3 as depicted in SEQ ID NO: 1196,
   [0298] CDR-H1 as depicted in SEQ ID NO: 1204, CDR-H2 as depicted in SEQ ID NO: 1205, CDR-H3 as depicted in SEQ ID NO: 1206, CDR-L1 as depicted in SEQ ID NO: 1207, CDR-L2 as depicted in SEQ ID NO: 1208 and CDR-L3 as depicted in SEQ ID NO: 1209,
   [0299] CDR-H1 as depicted in SEQ ID NO: 1217, CDR-H2 as depicted in SEQ ID NO: 1218, CDR-H3 as depicted in SEQ ID NO: 1219, CDR-L1 as depicted in SEQ ID NO: 1220, CDR-L2 as depicted in SEQ ID NO: 1221 and CDR-L3 as depicted in SEQ ID NO: 1222,
   [0300] CDR-H1 as depicted in SEQ ID NO: 1230, CDR-H2 as depicted in SEQ ID NO: 1231, CDR-H3 as depicted in SEQ ID NO: 1232, CDR-L1 as depicted in SEQ ID NO: 1233, CDR-L2 as depicted in SEQ ID NO: 1234 and CDR-L3 as depicted in SEQ ID NO: 1235,
   [0301] CDR-H1 as depicted in SEQ ID NO: 1308, CDR-H2 as depicted in SEQ ID NO: 1309, CDR-H3 as depicted in SEQ ID NO: 1310, CDR-L1 as depicted in SEQ ID NO: 1311, CDR-L2 as depicted in SEQ ID NO: 1312 and CDR-L3 as depicted in SEQ ID NO: 1313,
   [0302] CDR-H1 as depicted in SEQ ID NO: 1321, CDR-H2 as depicted in SEQ ID NO: 1322, CDR-H3 as depicted in SEQ ID NO: 1323, CDR-L1 as depicted in SEQ ID NO: 1324, CDR-L2 as depicted in SEQ ID NO: 1325 and CDR-L3 as depicted in SEQ ID NO: 1326,
   [0303] CDR-H1 as depicted in SEQ ID NO: 1373, CDR-H2 as depicted in SEQ ID NO: 1374, CDR-H3 as depicted in SEQ ID NO: 1375, CDR-L1 as depicted in SEQ ID NO: 1376, CDR-L2 as depicted in SEQ ID NO: 1377 and CDR-L3 as depicted in SEQ ID NO: 1378,
   [0304] CDR-H1 as depicted in SEQ ID NO: 1386, CDR-H2 as depicted in SEQ ID NO: 1387, CDR-H3 as depicted in SEQ ID NO: 1388, CDR-L1 as depicted in SEQ ID NO: 1389, CDR-L2 as depicted in SEQ ID NO: 1390 and CDR-L3 as depicted in SEQ ID NO: 1391,
   [0305] CDR-H1 as depicted in SEQ ID NO: 1399, CDR-H2 as depicted in SEQ ID NO: 1400, CDR-H3 as depicted in SEQ ID NO: 1401, CDR-L1 as depicted in SEQ ID NO: 1402, CDR-L2 as depicted in SEQ ID NO: 1403 and CDR-L3 as depicted in SEQ ID NO: 1404,
   [0306] CDR-H1 as depicted in SEQ ID NO: 1412, CDR-H2 as depicted in SEQ ID NO: 1413, CDR-H3 as depicted in SEQ ID NO: 1414, CDR-L1 as depicted in SEQ ID NO: 1415, CDR-L2 as depicted in SEQ ID NO: 1416 and CDR-L3 as depicted in SEQ ID NO: 1417;
   [0307] which all characterize binding domains for CDH19 grouped into bin 4; and
[0308] (e) CDR-H1 as depicted in SEQ ID NO: 76, CDR-H2 as depicted in SEQ ID NO: 77, CDR-H3 as depicted in SEQ ID NO: 78, CDR-L1 as depicted in SEQ ID NO: 244, CDR-L2 as depicted in SEQ ID NO: 245 and CDR-L3 as depicted in SEQ ID NO: 246, CDR-H1 as depicted in SEQ ID NO: 88, CDR-H2 as depicted in SEQ ID NO: 89, CDR-H3 as depicted in SEQ ID NO: 90, CDR-L1 as depicted in SEQ ID NO: 256, CDR-L2 as depicted in SEQ ID NO: 257 and CDR-L3 as depicted in SEQ ID NO: 258, CDR-H1 as depicted in SEQ ID NO: 106, CDR-H2 as depicted in SEQ ID NO: 107, CDR-H3 as depicted in SEQ ID NO: 108, CDR-L1 as depicted in SEQ ID NO: 274, CDR-L2 as depicted in SEQ ID NO: 275 and CDR-L3 as depicted in SEQ ID NO: 276, CDR-H1 as depicted in SEQ ID NO: 112, CDR-H2 as depicted in SEQ ID NO: 113, CDR-H3 as depicted in SEQ ID NO: 114, CDR-L1 as depicted in SEQ ID NO: 280, CDR-L2 as depicted in SEQ ID NO: 281 and CDR-L3 as depicted in SEQ ID NO: 282, CDR-H1 as depicted in SEQ ID NO: 106, CDR-H2 as depicted in SEQ ID NO: 107, CDR-H3 as depicted in SEQ ID NO: 108, CDR-L1 as depicted in SEQ ID NO: 274, CDR-L2 as depicted in SEQ ID NO: 275 and CDR-L3 as depicted in SEQ ID NO: 276, and
   [0309] CDR-H1 as depicted in SEQ ID NO: 983, CDR-H2 as depicted in SEQ ID NO: 984, CDR-H3 as depicted in SEQ ID NO: 985, CDR-L1 as depicted in SEQ ID NO: 986, CDR-L2 as depicted in SEQ ID NO: 987 and CDR-L3 as depicted in SEQ ID NO: 988,
      which all characterize binding domains for CDH19 grouped into bin 5.

[0310] In a further embodiment of the antibody construct of the invention the first binding domain comprises a VH region selected from the group consisting of VH regions
[0311] (a) as depicted in SEQ ID NO: 362, SEQ ID NO: 364, SEQ ID NO: 485, SEQ ID NO: 486, SEQ ID NO: 487, SEQ ID NO: 492, SEQ ID NO: 493, SEQ ID NO: 494, SEQ ID NO: 495, SEQ ID NO: 1133, SEQ ID NO: 1172, SEQ ID NO: 1341, SEQ ID NO: 1354, SEQ ID NO: 1367, SEQ ID NO: 1432, and SEQ ID NO: 1445 grouped into bin 1;
[0312] (b) as depicted in SEQ ID NO: 342, SEQ ID NO: 366, SEQ ID NO: 370, SEQ ID NO: 344, SEQ ID NO: 372, SEQ ID NO: 368, SEQ ID NO: 496, SEQ ID NO: 497, SEQ ID NO: 498, SEQ ID NO: 499, SEQ ID NO: 500, SEQ ID NO: 508, SEQ ID NO: 509, SEQ ID NO:510, SEQ ID NO:511, SEQ ID NO:512, SEQ ID NO:519, SEQ ID NO: 520, SEQ ID NO: 521, SEQ ID NO: 522, SEQ ID NO: 523, SEQ ID NO: 524, SEQ ID NO: 525, SEQ ID NO: 526, SEQ ID NO: 527, SEQ ID NO: 528, SEQ ID NO: 529, SEQ ID NO: 530, SEQ ID NO: 531, SEQ ID NO: 532, SEQ ID NO: 533, SEQ ID NO: 534, SEQ ID NO: 535, SEQ ID NO: 536, SEQ ID NO: 537, SEQ ID NO: 538, SEQ ID NO: 1016, SEQ ID NO: 1029, SEQ ID NO: 1042, SEQ ID NO: 1081, SEQ ID NO: 1107, SEQ ID NO: 1120, SEQ ID NO: 1250, SEQ ID NO: 1263, SEQ ID NO: 1276, SEQ ID NO: 1289, and SEQ ID NO: 1302;
   [0313] grouped into bin 2;
[0314] (c) as depicted in SEQ ID NO: 338, SEQ ID NO: 354, SEQ ID NO: 378, SEQ ID NO: 356, SEQ ID NO: 476, SEQ ID NO: 477, SEQ ID NO: 478, SEQ ID NO: 479, SEQ ID NO:480, SEQ ID NO:481, SEQ ID NO: 482, SEQ ID NO: 483, SEQ ID NO: 484, SEQ ID NO:501, SEQ ID NO:502, SEQ ID NO: 503, SEQ ID NO:504, SEQ ID NO: 505, SEQ ID NO: 506, SEQ ID NO: 517, SEQ ID NO: 518, SEQ ID NO: 1003, SEQ ID NO: 1055, and SEQ ID NO: 1094;
   [0315] grouped into bin 3;
[0316] (d) as depicted in SEQ ID NO: 352, SEQ ID NO: 360, SEQ ID NO: 388, SEQ ID NO: 386, SEQ ID NO: 340, SEQ ID NO: 346, SEQ ID NO: 374, SEQ ID NO: 348, SEQ ID NO: 390, SEQ ID NO: 463, SEQ ID NO: 464, SEQ ID NO: 465, SEQ ID NO: 466, SEQ ID NO: 467, SEQ ID NO: 468, SEQ ID NO: 469, SEQ ID NO: 470, SEQ ID NO: 471, SEQ ID NO: 472, SEQ ID NO: 473, SEQ ID NO: 474, SEQ ID NO: 475, SEQ ID NO: 488, SEQ ID NO: 489, SEQ ID NO: 490, SEQ ID NO: 491, SEQ ID NO: 513, SEQ ID NO: 514, SEQ ID NO: 515, SEQ ID NO: 516, SEQ ID NO: 540, SEQ ID NO:541, SEQ ID NO:542, SEQ ID NO: 543, SEQ ID NO:977, SEQ ID NO: 1068, SEQ ID NO: 1146, SEQ ID NO: 1159, SEQ ID NO: 1185, SEQ ID NO: 1198, SEQ ID NO: 1211, SEQ ID NO: 1224, SEQ ID NO: 1237, SEQ ID NO: 1315, SEQ ID NO: 1328, SEQ ID NO: 1380, SEQ ID NO: 1393, SEQ ID NO: 1406, and SEQ ID NO: 1419;
   [0317] grouped into bin 4; and
[0318] (e) as depicted in SEQ ID NO: 376, SEQ ID NO: 392, SEQ ID NO: 358, SEQ ID NO: 350, SEQ ID NO: 507, and SEQ ID NO: 990
   [0319] grouped into bin 5.

[0320] In another embodiment of the antibody construct of the invention the first binding domain comprises a VL region selected from the group consisting of VL regions
[0321] (a) as depicted in SEQ ID NO: 418, SEQ ID NO: 420, SEQ ID NO: 580, SEQ ID NO: 581, SEQ ID NO: 582, SEQ ID NO: 587, SEQ ID NO: 588, SEQ ID NO: 589, SEQ ID NO: 590, SEQ ID NO: 1135, SEQ ID NO: 1174, SEQ ID NO: 1343, SEQ ID NO: 1356, SEQ ID NO: 1369, SEQ ID NO: 1434, and SEQ ID NO: 1447;
   [0322] grouped into bin 1;
[0323] (b) as depicted in SEQ ID NO: 398, SEQ ID NO: 422, SEQ ID NO: 426, SEQ ID NO: 400, SEQ ID NO: 428, SEQ ID NO: 424, SEQ ID NO: 591, SEQ ID NO: 592, SEQ ID NO: 593, SEQ ID NO: 594, SEQ ID NO: 595, SEQ ID NO: 603, SEQ ID NO: 604, SEQ ID NO: 605, SEQ ID NO: 606, SEQ ID NO: 607, SEQ ID NO: 614, SEQ ID NO: 615, SEQ ID NO: 616, SEQ ID NO: 617, SEQ ID NO: 618, SEQ ID NO: 619, SEQ ID NO:620, SEQ ID NO:621, SEQ ID NO: 622, SEQ ID NO:623, SEQ ID NO: 624, SEQ ID NO: 625, SEQ ID NO: 626, SEQ ID NO: 627, SEQ ID NO: 628, SEQ ID NO:629, SEQ ID NO:630, SEQ ID NO: 631, SEQ ID NO:632, SEQ ID NO: 633, SEQ ID NO: 1018, SEQ ID NO: 1031, SEQ ID NO: 1044, SEQ ID NO: 1083, SEQ ID NO: 1109, SEQ ID NO: 1122, SEQ ID NO: 1252, SEQ ID NO: 1265, SEQ ID NO: 1278, SEQ ID NO: 1291, and SEQ ID NO: 1304;
   [0324] grouped into bin 2;
[0325] (c) as depicted in SEQ ID NO: 394, SEQ ID NO: 410, SEQ ID NO: 434, SEQ ID NO: 412, SEQ ID NO: 571, SEQ ID NO: 572, SEQ ID NO: 573, SEQ ID NO: 574, SEQ ID NO: 575, SEQ ID NO: 576, SEQ ID NO: 577, SEQ ID NO: 578, SEQ ID NO: 579, SEQ ID NO: 596, SEQ ID NO: 597, SEQ ID NO: 598, SEQ ID NO: 599, SEQ ID NO: 600, SEQ ID NO: 601, SEQ ID NO: 612, SEQ ID NO: 613, SEQ ID NO: 1005, SEQ ID NO: 1057, and SEQ ID NO: 1096;
   [0326] grouped into bin 3;
[0327] (d) as depicted in SEQ ID NO: 408, SEQ ID NO: 416, SEQ ID NO: 444, SEQ ID NO: 442, SEQ ID NO: 396, SEQ ID NO: 402, SEQ ID NO: 430, SEQ ID NO: 404, SEQ ID NO: 446, SEQ ID NO: 558, SEQ ID NO: 559, SEQ ID NO: 560, SEQ ID NO: 561, SEQ ID NO: 562, SEQ ID NO: 563, SEQ ID NO: 564, SEQ ID NO: 565, SEQ ID NO: 566, SEQ ID NO: 567, SEQ ID NO: 568, SEQ ID NO: 569, SEQ ID NO: 570, SEQ ID NO: 583, SEQ ID NO: 584, SEQ ID NO: 585, SEQ ID NO: 586, SEQ ID NO:608, SEQ ID NO:609, SEQ ID NO:610, SEQ ID NO:611, SEQ ID NO:635, SEQ ID NO: 636, SEQ ID NO: 637, SEQ ID NO: 638, SEQ ID NO: 979, SEQ ID NO: 1070, SEQ ID NO: 1148, SEQ ID NO: 1161, SEQ ID NO: 1187, SEQ ID NO: 1200, SEQ ID NO: 1213, SEQ ID NO: 1226, SEQ ID NO: 1239, SEQ ID NO: 1317, SEQ ID NO: 1330, SEQ ID NO: 1382, SEQ ID NO: 1395, SEQ ID NO: 1408, and SEQ ID NO: 1421
   [0328] grouped into bin 4; and
[0329] (e) as depicted in SEQ ID NO: 432, SEQ ID NO: 448, SEQ ID NO: 414, SEQ ID NO: 406, SEQ ID NO: 602, and SEQ ID NO: 992
   [0330] grouped into bin 5.

[0331] The invention further provides an embodiment of the antibody construct of the invention, wherein the first binding domain comprises a VH region and a VL region selected from the group consisting of:
[0332] (1) pairs of a VH region and a VL region as depicted in SEQ ID NOs: 362+418, SEQ ID NOs: 364+420, SEQ ID NOs: 485+580, SEQ ID NOs: 486+581, SEQ ID NOs: 487+582, SEQ ID NOs: 492+587, SEQ ID NOs: 493+588, SEQ ID NOs: 494+589, SEQ ID NOs: 495+590, SEQ ID NOs: 1133+1135, SEQ ID NOs: 1172+1174, SEQ ID NOs: 1341+1343, SEQ ID NOs: 1354+1356, SEQ ID NOs: 1367+1369, SEQ ID NOs: 1432+1434, and SEQ ID NOs: 1445+1447;
   [0333] all pairs grouped into bin 1;
[0334] (2) pairs of a VH region and a VL region as depicted in SEQ ID NOs: 342+398, SEQ ID NOs: 366+422, SEQ ID NOs: 370+426, SEQ ID NOs: 344+400, SEQ ID NOs: 372+428, SEQ ID NOs: 368+424, SEQ ID NOs: 496+591, SEQ ID NOs: 497+592, SEQ ID NOs: 498+593, SEQ ID NOs: 499+594, SEQ ID NOs: 500+595, SEQ ID NOs: 508+603, SEQ ID NOs: 509+604, SEQ ID NOs: 510+605, SEQ ID NOs: 511+606, SEQ ID NOs: 512+607, SEQ ID NOs: 519+614, SEQ ID NOs: 520+615, SEQ ID NOs: 521+616, SEQ ID NOs: 522+617, SEQ ID NOs: 523+618, SEQ ID NOs: 524+619, SEQ ID NOs: 525+620, SEQ ID NOs: 526+621, SEQ ID NOs: 527+622, SEQ ID NOs: 528+623, SEQ ID NOs: 529+624, SEQ ID NOs: 530+625, SEQ ID NOs: 531+626, SEQ ID NOs: 532+627, SEQ ID NOs: 533+628, SEQ ID NOs: 534+629, SEQ ID NOs: 535+630, SEQ ID NOs: 536+631, SEQ ID NOs: 537+632, SEQ ID NOs: 538+633, SEQ ID NOs: 1016+1018, SEQ ID NOs: 1029+1031, SEQ ID NOs: 1042+1044, SEQ ID NOs: 1081+1083, SEQ ID NOs: 1107+1109, SEQ ID NOs: 1120+1122, SEQ ID NOs: 1250+1252, SEQ ID NOs: 1263+1265, SEQ ID NOs: 1276+1278, SEQ ID NOs: 1289+1291, and SEQ ID NOs: 1302+1304;
   [0335] all pairs grouped into bin 2;
[0336] (3) pairs of a VH region and a VL region as depicted in SEQ ID NOs: 338+394, SEQ ID NOs: 354+410, SEQ ID NOs: 378+434, SEQ ID NOs: 356+412, SEQ ID NOs: 476+571, SEQ ID NOs: 477+572, SEQ ID NOs: 478+573, SEQ ID NOs: 479+574, SEQ ID NOs: 480+575, SEQ ID NOs: 481+576, SEQ ID NOs: 482+577, SEQ ID NOs: 483+578, SEQ ID NOs: 484+579, SEQ ID NOs: 501+596, SEQ ID NOs: 502+597, SEQ ID NOs: 503+598, SEQ ID NOs: 504+599, SEQ ID NOs: 505+600, SEQ ID NOs: 506+601, SEQ ID NOs: 517+612, SEQ ID NOs: 518+613, SEQ ID NOs: 1003+1005, SEQ ID NOs: 1055+1057, and SEQ ID NOs: 1094+1096;
   [0337] all pairs grouped into bin 3;
[0338] (4) pairs of a VH region and a VL region as depicted in SEQ ID NOs: 352+408, SEQ ID NOs: 360+416, SEQ ID NOs: 388+444, SEQ ID NOs: 386+442, SEQ ID NOs: 340+396, SEQ ID NOs: 346+402, SEQ ID NOs: 374+430, SEQ ID NOs: 348+404, SEQ ID NOs: 390+446, SEQ ID NOs: 463+558, SEQ ID NOs: 464+559, SEQ ID NOs: 465+560, SEQ ID NOs: 466+561, SEQ ID NOs: 467+562, SEQ ID NOs: 468+563, SEQ ID NOs: 469+564, SEQ ID NOs: 470+565, SEQ ID NOs: 471+566, SEQ ID NOs: 472+567, SEQ ID NOs: 473+568, SEQ ID NOs: 474+569, SEQ ID NOs: 475+570, SEQ ID NOs: 488+583, SEQ ID NOs: 489+584, SEQ ID NOs: 490+585, SEQ ID NOs: 491+586, SEQ ID NOs: 513+608, SEQ ID NOs: 514+609, SEQ ID NOs: 515+610, SEQ ID NOs: 516+611, SEQ ID NOs: 540+635, SEQ ID NOs: 541+636, SEQ ID NOs: 542+637, SEQ ID NOs: 543+638, SEQ ID NOs: 977+979, SEQ ID NOs: 1068+1070, SEQ ID NOs: 1146+1148, SEQ ID NOs: 1159+1161, SEQ ID NOs: 1185+1187, SEQ ID NOs: 1198+1200, SEQ ID NOs: 1211+1213, SEQ ID NOs: 1224+1226, SEQ ID NOs: 1237+1239, SEQ ID NOs: 1315+1317, SEQ ID NOs: 1328+1330, SEQ ID NOs: 1380, +1382 SEQ ID NOs: 1393+1395, SEQ ID NOs: 1406+1408, and SEQ ID NOs: 1419+1421;
   [0339] all pairs grouped into bin 4; and
[0340] (5) pairs of a VH region and a VL region as depicted in SEQ ID NOs: 376+432, SEQ ID NOs: 392+448, SEQ ID NOs: 358+414, SEQ ID NOs: 350+406, SEQ ID NOs: 507+602, and SEQ ID NOs: 990+992
   [0341] all pairs grouped into bin 5.

[0342] In a further embodiment of the invention the antibody construct is in a format selected from the group consisting of (scFv)₂, (single domain mAb)₂, scFv-single domain mAb, diabodies and oligomers thereof.

[0343] In a preferred embodiment the first binding domain comprises an amino acid selected from the group consisting of
[0344] (a) as depicted in SEQ ID NO: 117, SEQ ID NO: 1137, SEQ ID NO: 1176, SEQ ID NO: 1345, SEQ ID NO: 1358, SEQ ID NO: 1371, SEQ ID NO: 1436, and SEQ ID NO: 1449;
   [0345] all binders grouped into bin 1;
[0346] (b) as depicted in SEQ ID NO: 1020, SEQ ID NO: 1033, SEQ ID NO: 1046, SEQ ID NO: 1085, SEQ ID NO: 1111, SEQ ID NO: 1124, SEQ ID NO: 1254, SEQ ID NO: 1267, SEQ ID NO: 1280, SEQ ID NO: 1293, and SEQ ID NO: 1306;
   [0347] all binders grouped into bin 2;
[0348] (c) as depicted in SEQ ID NO: 1007, SEQ ID NO: 1059, and SEQ ID NO: 1098; all binders grouped into bin 3;
[0349] (d) as depicted in SEQ ID NO: 981, SEQ ID NO: 1072, SEQ ID NO: 1150, SEQ ID NO: 1163, SEQ ID NO: 1189, SEQ ID NO: 1202, SEQ ID NO: 1215, SEQ ID NO: 1228, SEQ ID NO: 1241, SEQ ID NO: 1319, SEQ ID NO: 1332, SEQ ID NO: 1384, SEQ ID NO: 1397, SEQ ID NO: 1410, and SEQ ID NO: 1423;
   [0350] all binders grouped into bin 4; and
[0351] (e) as depicted in SEQ ID NO: 994 grouped into bin 5.

[0352] In one aspect of the invention, the second binding domain is capable of binding to to human CD3 and to macaque CD3, preferably to human CD3 epsilon and to macaque CD3 epsilon. Additionally or alternatively, the second binding domain is capable of binding to Callithrix jacchus, Saguinus oedipus and/or Saimiri sciureus CD3 epsilon. According to these embodiments, one or both binding domains of the antibody construct of the invention are preferably cross-species specific for members of the mammalian order of primates. Cross-species specific CD3 binding domains are, for example, described in WO 2008/119567.

[0353] It is particularly preferred for the antibody construct of the present invention that the second binding domain capable of binding to the T cell CD3 receptor complex comprises a VL region comprising CDR-L1, CDR-L2 and CDR-L3 selected from:
[0354] (a) CDR-L1 as depicted in SEQ ID NO: 27 of WO 2008/119567, CDR-L2 as depicted in SEQ ID NO: 28 of WO 2008/119567 and CDR-L3 as depicted in SEQ ID NO: 29 of WO 2008/119567;
[0355] (b) CDR-L1 as depicted in SEQ ID NO: 117 of WO 2008/119567, CDR-L2 as depicted in SEQ ID NO: 118 of WO 2008/119567 and CDR-L3 as depicted in SEQ ID NO: 119 of WO 2008/119567; and
[0356] (c) CDR-L1 as depicted in SEQ ID NO: 153 of WO 2008/119567, CDR-L2 as depicted in SEQ ID NO: 154 of WO 2008/119567 and CDR-L3 as depicted in SEQ ID NO: 155 of WO 2008/119567.

[0357] In an alternatively preferred embodiment of the antibody construct of the present invention, the second binding domain capable of binding to the T cell CD3 receptor complex comprises a VH region comprising CDR-H 1, CDR-H2 and CDR-H3 selected from:
[0358] (a) CDR-H1 as depicted in SEQ ID NO: 12 of WO 2008/119567, CDR-H2 as depicted in SEQ ID NO: 13 of WO 2008/119567 and CDR-H3 as depicted in SEQ ID NO: 14 of WO 2008/119567;
[0359] (b) CDR-H1 as depicted in SEQ ID NO: 30 of WO 2008/119567, CDR-H2 as depicted in SEQ ID NO: 31 of WO 2008/119567 and CDR-H3 as depicted in SEQ ID NO: 32 of WO 2008/119567;
[0360] (c) CDR-H1 as depicted in SEQ ID NO: 48 of WO 2008/119567, CDR-H2 as depicted in SEQ ID NO: 49 of WO 2008/119567 and CDR-H3 as depicted in SEQ ID NO: 50 of WO 2008/119567;
[0361] (d) CDR-H1 as depicted in SEQ ID NO: 66 of WO 2008/119567, CDR-H2 as depicted in SEQ ID NO: 67 of WO 2008/119567 and CDR-H3 as depicted in SEQ ID NO: 68 of WO 2008/119567;
[0362] (e) CDR-H1 as depicted in SEQ ID NO: 84 of WO 2008/119567, CDR-H2 as depicted in SEQ ID NO: 85 of WO 2008/119567 and CDR-H3 as depicted in SEQ ID NO: 86 of WO 2008/119567;
[0363] (f) CDR-H1 as depicted in SEQ ID NO: 102 of WO 2008/119567, CDR-H2 as depicted in SEQ ID NO: 103 of WO2008/119567 and CDR-H3 as depicted in SEQ ID NO: 104 of WO 2008/119567;
[0364] (g) CDR-H1 as depicted in SEQ ID NO: 120 of WO 2008/119567, CDR-H2 as depicted in SEQ ID NO: 121 of WO2008/119567 and CDR-H3 as depicted in SEQ ID NO: 122 of WO 2008/119567;
[0365] (h) CDR-H1 as depicted in SEQ ID NO: 138 of WO 2008/119567, CDR-H2 as depicted in SEQ ID NO: 139 of WO2008/119567 and CDR-H3 as depicted in SEQ ID NO: 140 of WO 2008/119567;
[0366] (i) CDR-H1 as depicted in SEQ ID NO: 156 of WO 2008/119567, CDR-H2 as depicted in SEQ ID NO: 157 of WO2008/119567 and CDR-H3 as depicted in SEQ ID NO: 158 of WO 2008/119567; and
[0367] (j) CDR-H1 as depicted in SEQ ID NO: 174 of WO 2008/119567, CDR-H2 as depicted in SEQ ID NO: 175 of WO2008/119567 and CDR-H3 as depicted in SEQ ID NO: 176 of WO 2008/119567.

[0368] It is further preferred for the antibody construct of the present invention that the second binding domain capable of binding to the T cell CD3 receptor complex comprises a VL region selected from the group consisting of a VL region as depicted in SEQ ID NO: 35, 39, 125, 129, 161 or 165 of WO 2008/119567.

[0369] It is alternatively preferred that the second binding domain capable of binding to the T cell CD3 receptor complex comprises a VH region selected from the group consisting of a VH region as depicted in SEQ ID NO: 15, 19, 33, 37, 51, 55, 69, 73, 87, 91, 105, 109, 123, 127, 141, 145, 159, 163, 177 or 181 of WO 2008/119567.

[0370] More preferably, the antibody construct of the present invention is characterized by the second binding domain capable of binding to the T cell CD3 receptor complex comprising a VL region and a VH region selected from the group consisting of:
[0371] (a) a VL region as depicted in SEQ ID NO: 17 or 21 of WO 2008/119567 and a VH region as depicted in SEQ ID NO: 15 or 19 of WO 2008/119567;
[0372] (b) a VL region as depicted in SEQ ID NO: 35 or 39 of WO 2008/119567 and a VH region as depicted in SEQ ID NO: 33 or 37 of WO 2008/119567;
[0373] (c) a VL region as depicted in SEQ ID NO: 53 or 57 of WO 2008/119567 and a VH region as depicted in SEQ ID NO: 51 or 55 of WO 2008/119567;
[0374] (d) a VL region as depicted in SEQ ID NO: 71 or 75 of WO 2008/119567 and a VH region as depicted in SEQ ID NO: 69 or 73 of WO 2008/119567;
[0375] (e) a VL region as depicted in SEQ ID NO: 89 or 93 of WO 2008/119567 and a VH region as depicted in SEQ ID NO: 87 or 91 of WO 2008/119567;
[0376] (f) a VL region as depicted in SEQ ID NO: 107 or 111 of WO 2008/119567 and a VH region as depicted in SEQ ID NO: 105 or 109 of WO 2008/119567;
[0377] (g) a VL region as depicted in SEQ ID NO: 125 or 129 of WO 2008/119567 and a VH region as depicted in SEQ ID NO: 123 or 127 of WO 2008/119567;
[0378] (h) a VL region as depicted in SEQ ID NO: 143 or 147 of WO 2008/119567 and a VH region as depicted in SEQ ID NO: 141 or 145 of WO 2008/119567;
[0379] (i) a VL region as depicted in SEQ ID NO: 161 or 165 of WO 2008/119567 and a VH region as depicted in SEQ ID NO: 159 or 163 of WO 2008/119567; and
[0380] (j) a VL region as depicted in SEQ ID NO: 179 or 183 of WO 2008/119567 and a VH region as depicted in SEQ ID NO: 177 or 181 of WO 2008/119567.

[0381] According to a preferred embodiment of the antibody construct of the present invention, in particular the second binding domain capable of binding to the T cell CD3 receptor complex, the pairs of VH-regions and VL-regions are in the format of a single chain antibody (scFv). The VH and VL regions are arranged in the order VH-VL or VL-VH. It is preferred that the VH-region is positioned N-terminally to a linker sequence. The VL-region is positioned C-terminally of the linker sequence.

[0382] A preferred embodiment of the above described antibody construct of the present invention is characterized by the second binding domain capable of binding to the T cell CD3 receptor complex comprising an amino acid sequence selected from the group consisting of SEQ ID NOs: 23, 25, 41, 43, 59, 61, 77, 79, 95, 97, 113, 115, 131, 133, 149, 151, 167, 169, 185 or 187 of WO 2008/119567.

[0383] In a preferred embodiment the antibody construct of the invention has an amino acid sequence selected from the group consisting of
[0384] (a) as depicted in SEQ ID NO: 1138, SEQ ID NO: 1177, SEQ ID NO: 1346, SEQ ID NO: 1359, SEQ ID NO: 1372, SEQ ID NO: 1437, and SEQ ID NO: 1450;
[0385] (b) as depicted in SEQ ID NO: 1021, SEQ ID NO: 1034, SEQ ID NO: 1047, SEQ ID NO: 1086, SEQ ID NO: 1112, SEQ ID NO: 1125, SEQ ID NO: 1255, SEQ ID NO: 1268, SEQ ID NO: 1281, SEQ ID NO: 1294, and SEQ ID NO: 1307;
[0386] (c) as depicted in SEQ ID NO: 1008, SEQ ID NO: 1060, and SEQ ID NO: 1099;
[0387] (d) as depicted in SEQ ID NO: 982, SEQ ID NO: 1073, SEQ ID NO: 1151, SEQ ID NO: 1164, SEQ ID NO: 1190, SEQ ID NO: 1203, SEQ ID NO: 1216, SEQ ID NO: 1229, SEQ ID NO: 1242, SEQ ID NO: 1320, SEQ ID NO: 1333, SEQ ID NO: 1385, SEQ ID NO: 1398, SEQ ID NO: 1411, and SEQ ID NO: 1424; and
[0388] (e) as depicted in SEQ ID NO: 995.

[0389] The invention further provides a nucleic acid sequence encoding an antibody construct of the invention.

[0390] Furthermore, the invention provides a vector comprising a nucleic acid sequence of the invention. Moreover, the invention provides a host cell transformed or transfected with the nucleic acid sequence of the invention.

[0391] In a further embodiment the invention provides a process for the production of a antibody construct of the invention, said process comprising culturing a host cell of the invention under conditions allowing the expression of the antibody construct of the invention and recovering the produced antibody construct from the culture.

[0392] Moreover, the invention provides a pharmaceutical composition comprising an antibody construct of the invention or produced according to the process of the invention

[0393] The formulations described herein are useful as pharmaceutical compositions in the treatment, amelioration and/or prevention of the pathological medical condition as described herein in a patient in need thereof. The term “treatment” refers to both therapeutic treatment and prophylactic or preventative measures. Treatment includes the application or administration of the formulation to the body, an isolated tissue, or cell from a patient who has a disease/disorder, a symptom of a disease/disorder, or a predisposition toward a disease/disorder, with the purpose to cure, heal, alleviate, relieve, alter, remedy, ameliorate, improve, or affect the disease, the symptom of the disease, or the predisposition toward the disease.

[0394] Those “in need of treatment” include those already with the disorder, as well as those in which the disorder is to be prevented. The term “disease” is any condition that would benefit from treatment with the protein formulation described herein. This includes chronic and acute disorders or diseases including those pathological conditions that predispose the mammal to the disease in question. Non-limiting examples of diseases/disorders to be treated herein include proliferative disease, a tumorous disease, or an immunological disorder.

[0395] In some embodiments, the invention provides a pharmaceutical composition comprising a therapeutically effective amount of one or a plurality of the antibody construct of the invention together with a pharmaceutically effective diluents, carrier, solubilizer, emulsifier, preservative, and/or adjuvant. Pharmaceutical compositions of the invention include, but are not limited to, liquid, frozen, and lyophilized compositions.

[0396] Preferably, formulation materials are nontoxic to recipients at the dosages and concentrations employed. In specific embodiments, pharmaceutical compositions comprising a therapeutically effective amount of an antibody construct of the invention.

[0397] In certain embodiments, the pharmaceutical composition may contain formulation materials for modifying, maintaining or preserving, for example, the pH, osmolarity, viscosity, clarity, color, isotonicity, odor, sterility, stability, rate of dissolution or release, adsorption or penetration of the composition. In such embodiments, suitable formulation materials include, but are not limited to, amino acids (such as glycine, glutamine, asparagine, arginine, proline, or lysine); antimicrobials; antioxidants (such as ascorbic acid, sodium sulfite or sodium hydrogen-sulfite); buffers (such as borate, bicarbonate, Tris-HCl, citrates, phosphates or other organic acids); bulking agents (such as mannitol or glycine); chelating agents (such as ethylenediamine tetraacetic acid (EDTA)); complexing agents (such as caffeine, polyvinylpyrrolidone, beta-cyclodextrin or hydroxypropyl-beta-cyclodextrin); fillers; monosaccharides; disaccharides; and other carbohydrates (such as glucose, mannose or dextrins); proteins (such as serum albumin, gelatin or immunoglobulins); coloring, flavoring and diluting agents; emulsifying agents; hydrophilic polymers (such as polyvinylpyrrolidone); low molecular weight polypeptides; salt-forming counterions (such as sodium); preservatives (such as benzalkonium chloride, benzoic acid, salicylic acid, thimerosal, phenethyl alcohol, methylparaben, propylparaben, chlorhexidine, sorbic acid or hydrogen peroxide); solvents (such as glycerin, propylene glycol or polyethylene glycol); sugar alcohols (such as mannitol or sorbitol); suspending agents; surfactants or wetting agents (such as pluronics, PEG, sorbitan esters, polysorbates such as polysorbate 20, polysorbate, triton, tromethamine, lecithin, cholesterol, tyloxapal); stability enhancing agents (such as sucrose or sorbitol); tonicity enhancing agents (such as alkali metal halides, preferably sodium or potassium chloride, mannitol sorbitol); delivery vehicles; diluents; excipients and/or pharmaceutical adjuvants. See, REMINGTON'S PHARMACEUTICAL SCIENCES, 18” Edition, (A. R. Genrmo, ed.), 1990, Mack Publishing Company.

[0398] In certain embodiments, the optimal pharmaceutical composition will be determined by one skilled in the art depending upon, for example, the intended route of administration, delivery format and desired dosage. See, for example, REMINGTON'S PHARMACEUTICAL SCIENCES, supra. In certain embodiments, such compositions may influence the physical state, stability, rate of in vivo release and rate of in vivo clearance of the antigen binding proteins of the invention. In certain embodiments, the primary vehicle or carrier in a pharmaceutical composition may be either aqueous or non-aqueous in nature. For example, a suitable vehicle or carrier may be water for injection, physiological saline solution or artificial cerebrospinal fluid, possibly supplemented with other materials common in compositions for parenteral administration. Neutral buffered saline or saline mixed with serum albumin are further exemplary vehicles. In specific embodiments, pharmaceutical compositions comprise Tris buffer of about pH 7.0-8.5, or acetate buffer of about pH 4.0-5.5, and may further include sorbitol or a suitable substitute therefore. In certain embodiments of the invention, human antibody or antigen binding fragment thereof of the invention or the antibody construct of the invention compositions may be prepared for storage by mixing the selected composition having the desired degree of purity with optional formulation agents (REMINGTON'S PHARMACEUTICAL SCIENCES, supra) in the form of a lyophilized cake or an aqueous solution. Further, in certain embodiments, the human antibody or antigen binding fragment thereof of the invention or the antibody construct of the invention may be formulated as a lyophilizate using appropriate excipients such as sucrose.

[0399] The pharmaceutical compositions of the invention can be selected for parenteral delivery. Alternatively, the compositions may be selected for inhalation or for delivery through the digestive tract, such as orally. Preparation of such pharmaceutically acceptable compositions is within the skill of the art. The formulation components are present preferably in concentrations that are acceptable to the site of administration. In certain embodiments, buffers are used to maintain the composition at physiological pH or at a slightly lower pH, typically within a pH range of from about 5 to about 8.

[0400] When parenteral administration is contemplated, the therapeutic compositions for use in this invention may be provided in the form of a pyrogen-free, parenterally acceptable aqueous solution comprising the desired human antibody or antigen binding fragment thereof of the invention or the antibody construct of the invention in a pharmaceutically acceptable vehicle. A particularly suitable vehicle for parenteral injection is sterile distilled water in which the antibody construct of the invention is formulated as a sterile, isotonic solution, properly preserved. In certain embodiments, the preparation can involve the formulation of the desired molecule with an agent, such as injectable microspheres, bio-erodible particles, polymeric compounds (such as polylactic acid or polyglycolic acid), beads or liposomes, that may provide controlled or sustained release of the product which can be delivered via depot injection. In certain embodiments, hyaluronic acid may also be used, having the effect of promoting sustained duration in the circulation. In certain embodiments, implantable drug delivery devices may be used to introduce the desired antigen binding protein.

[0401] Additional pharmaceutical compositions will be evident to those skilled in the art, including formulations involving h the antibody construct of the invention in sustained- or controlled-delivery formulations. Techniques for formulating a variety of other sustained- or controlled-delivery means, such as liposome carriers, bio-erodible microparticles or porous beads and depot injections, are also known to those skilled in the art. See, for example, International Patent Application No. PCT/US93/00829, which is incorporated by reference and describes controlled release of porous polymeric microparticles for delivery of pharmaceutical compositions. Sustained-release preparations may include semipermeable polymer matrices in the form of shaped articles, e.g., films, or microcapsules. Sustained release matrices may include polyesters, hydrogels, polylactides (as disclosed in U.S. Pat. No. 3,773,919 and European Patent Application Publication No. EP 058481, each of which is incorporated by reference), copolymers of L-glutamic acid and gamma ethyl-L-glutamate (Sidman et al., 1983, Biopolymers 2:547-556), poly (2-hydroxyethyl-methacrylate) (Langer et al., 1981, J. Biomed. Mater. Res. 15:167-277 and Langer, 1982, Chem. Tech. 12:98-105), ethylene vinyl acetate (Langer et al., 1981, supra) or poly-D(−)-3-hydroxybutyric acid (European Patent Application Publication No. EP 133,988). Sustained release compositions may also include liposomes that can be prepared by any of several methods known in the art. See, e.g., Eppstein et al., 1985, Proc. Natl. Acad. Sci. U.S.A. 82:3688-3692; European Patent Application Publication Nos. EP 036,676; EP 088,046 and EP 143,949, incorporated by reference.

[0402] Pharmaceutical compositions used for in vivo administration are typically provided as sterile preparations. Sterilization can be accomplished by filtration through sterile filtration membranes. When the composition is lyophilized, sterilization using this method may be conducted either prior to or following lyophilization and reconstitution. Compositions for parenteral administration can be stored in lyophilized form or in a solution. Parenteral compositions generally are placed into a container having a sterile access port, for example, an intravenous solution bag or vial having a stopper pierceable by a hypodermic injection needle.

[0403] Aspects of the invention includes self-buffering antibody construct of the invention formulations, which can be used as pharmaceutical compositions, as described in international patent application WO 06138181A2 (PCT/US2006/022599), which is incorporated by reference in its entirety herein.

[0404] As discussed above, certain embodiments provide antibody construct of the invention protein compositions, particularly pharmaceutical compositions of the invention, that comprise, in addition to the antibody construct of the invention, one or more excipients such as those illustratively described in this section and elsewhere herein. Excipients can be used in the invention in this regard for a wide variety of purposes, such as adjusting physical, chemical, or biological properties of formulations, such as adjustment of viscosity, and or processes of the invention to improve effectiveness and or to stabilize such formulations and processes against degradation and spoilage due to, for instance, stresses that occur during manufacturing, shipping, storage, pre-use preparation, administration, and thereafter. A variety of expositions are available on protein stabilization and formulation materials and methods useful in this regard, such as Arakawa et al., “Solvent interactions in pharmaceutical formulations,” Pharm Res. 8(3): 285-91 (1991); Kendrick et al., “Physical stabilization of proteins in aqueous solution,” in: RATIONAL DESIGN OF STABLE PROTEIN FORMULATIONS: THEORY AND PRACTICE, Carpenter and Manning, eds. Pharmaceutical Biotechnology. 13: 61-84 (2002), and Randolph et al., “Surfactant-protein interactions,” Pharm Biotechnol. 13: 159-75 (2002), each of which is herein incorporated by reference in its entirety, particularly in parts pertinent to excipients and processes of the same for self-buffering protein formulations in accordance with the current invention, especially as to protein pharmaceutical products and processes for veterinary and/or human medical uses.

[0405] Salts may be used in accordance with certain embodiments of the invention to, for example, adjust the ionic strength and/or the isotonicity of a formulation and/or to improve the solubility and/or physical stability of a protein or other ingredient of a composition in accordance with the invention.

[0406] As is well known, ions can stabilize the native state of proteins by binding to charged residues on the protein's surface and by shielding charged and polar groups in the protein and reducing the strength of their electrostatic interactions, attractive, and repulsive interactions. Ions also can stabilize the denatured state of a protein by binding to, in particular, the denatured peptide linkages (—CONH) of the protein. Furthermore, ionic interaction with charged and polar groups in a protein also can reduce intermolecular electrostatic interactions and, thereby, prevent or reduce protein aggregation and insolubility.

[0407] Ionic species differ significantly in their effects on proteins. A number of categorical rankings of ions and their effects on proteins have been developed that can be used in formulating pharmaceutical compositions in accordance with the invention. One example is the Hofmeister series, which ranks ionic and polar non-ionic solutes by their effect on the conformational stability of proteins in solution. Stabilizing solutes are referred to as “kosmotropic.” Destabilizing solutes are referred to as “chaotropic.” Kosmotropes commonly are used at high concentrations (e.g., >1 molar ammonium sulfate) to precipitate proteins from solution (“salting-out”). Chaotropes commonly are used to denture and/or to solubilize proteins (“salting-in”). The relative effectiveness of ions to “salt-in” and “salt-out” defines their position in the Hofmeister series.

[0408] Free amino acids can be used in the antibody construct of the invention formulations in accordance with various embodiments of the invention as bulking agents, stabilizers, and antioxidants, as well as other standard uses. Lysine, proline, serine, and alanine can be used for stabilizing proteins in a formulation. Glycine is useful in lyophilization to ensure correct cake structure and properties. Arginine may be useful to inhibit protein aggregation, in both liquid and lyophilized formulations. Methionine is useful as an antioxidant.

[0409] Polyols include sugars, e.g., mannitol, sucrose, and sorbitol and polyhydric alcohols such as, for instance, glycerol and propylene glycol, and, for purposes of discussion herein, polyethylene glycol (PEG) and related substances. Polyols are kosmotropic. They are useful stabilizing agents in both liquid and lyophilized formulations to protect proteins from physical and chemical degradation processes. Polyols also are useful for adjusting the tonicity of formulations.

[0410] Among polyols useful in select embodiments of the invention is mannitol, commonly used to ensure structural stability of the cake in lyophilized formulations. It ensures structural stability to the cake. It is generally used with a lyoprotectant, e.g., sucrose. Sorbitol and sucrose are among preferred agents for adjusting tonicity and as stabilizers to protect against freeze-thaw stresses during transport or the preparation of bulks during the manufacturing process. Reducing sugars (which contain free aldehyde or ketone groups), such as glucose and lactose, can glycate surface lysine and arginine residues. Therefore, they generally are not among preferred polyols for use in accordance with the invention. In addition, sugars that form such reactive species, such as sucrose, which is hydrolyzed to fructose and glucose under acidic conditions, and consequently engenders glycation, also is not among preferred polyols of the invention in this regard. PEG is useful to stabilize proteins and as a cryoprotectant and can be used in the invention in this regard.

[0411] Embodiments of the antibody construct of the invention formulations further comprise surfactants. Protein molecules may be susceptible to adsorption on surfaces and to denaturation and consequent aggregation at air-liquid, solid-liquid, and liquid-liquid interfaces. These effects generally scale inversely with protein concentration. These deleterious interactions generally scale inversely with protein concentration and typically are exacerbated by physical agitation, such as that generated during the shipping and handling of a product.

[0412] Surfactants routinely are used to prevent, minimize, or reduce surface adsorption. Useful surfactants in the invention in this regard include polysorbate 20, polysorbate 80, other fatty acid esters of sorbitan polyethoxylates, and poloxamer 188.

[0413] Surfactants also are commonly used to control protein conformational stability. The use of surfactants in this regard is protein-specific since, any given surfactant typically will stabilize some proteins and destabilize others.

[0414] Polysorbates are susceptible to oxidative degradation and often, as supplied, contain sufficient quantities of peroxides to cause oxidation of protein residue side-chains, especially methionine. Consequently, polysorbates should be used carefully, and when used, should be employed at their lowest effective concentration. In this regard, polysorbates exemplify the general rule that excipients should be used in their lowest effective concentrations.

[0415] Embodiments of the antibody construct of the invention formulations further comprise one or more antioxidants. To some extent deleterious oxidation of proteins can be prevented in pharmaceutical formulations by maintaining proper levels of ambient oxygen and temperature and by avoiding exposure to light. Antioxidant excipients can be used as well to prevent oxidative degradation of proteins. Among useful antioxidants in this regard are reducing agents, oxygen/free-radical scavengers, and chelating agents. Antioxidants for use in therapeutic protein formulations in accordance with the invention preferably are water-soluble and maintain their activity throughout the shelf life of a product. EDTA is a preferred antioxidant in accordance with the invention in this regard.

[0416] Antioxidants can damage proteins. For instance, reducing agents, such as glutathione in particular, can disrupt intramolecular disulfide linkages. Thus, antioxidants for use in the invention are selected to, among other things, eliminate or sufficiently reduce the possibility of themselves damaging proteins in the formulation.

[0417] Formulations in accordance with the invention may include metal ions that are protein co-factors and that are necessary to form protein coordination complexes, such as zinc necessary to form certain insulin suspensions. Metal ions also can inhibit some processes that degrade proteins. However, metal ions also catalyze physical and chemical processes that degrade proteins.

[0418] Magnesium ions (10-120 mM) can be used to inhibit isomerization of aspartic acid to isoaspartic acid. Ca+2 ions (up to 100 mM) can increase the stability of human deoxyribonuclease. Mg+2, Mn+2, and Zn+2, however, can destabilize rhDNase. Similarly, Ca+2 and Sr+2 can stabilize Factor VIII, it can be destabilized by Mg+2, Mn+2 and Zn+2, Cu+2 and Fe+2, and its aggregation can be increased by Al+3 ions.

[0419] Embodiments of the antibody construct of the invention formulations further comprise one or more preservatives. Preservatives are necessary when developing multi-dose parenteral formulations that involve more than one extraction from the same container. Their primary function is to inhibit microbial growth and ensure product sterility throughout the shelf-life or term of use of the drug product. Commonly used preservatives include benzyl alcohol, phenol and m-cresol. Although preservatives have a long history of use with small-molecule parenterals, the development of protein formulations that includes preservatives can be challenging. Preservatives almost always have a destabilizing effect (aggregation) on proteins, and this has become a major factor in limiting their use in multi-dose protein formulations. To date, most protein drugs have been formulated for single-use only. However, when multi-dose formulations are possible, they have the added advantage of enabling patient convenience, and increased marketability. A good example is that of human growth hormone (hGH) where the development of preserved formulations has led to commercialization of more convenient, multi-use injection pen presentations. At least four such pen devices containing preserved formulations of hGH are currently available on the market. Norditropin (liquid, Novo Nordisk), Nutropin AQ (liquid, Genentech) & Genotropin (lyophilized—dual chamber cartridge, Pharmacia & Upjohn) contain phenol while Somatrope (Eli Lilly) is formulated with m-cresol. Several aspects need to be considered during the formulation and development of preserved dosage forms. The effective preservative concentration in the drug product must be optimized. This requires testing a given preservative in the dosage form with concentration ranges that confer anti-microbial effectiveness without compromising protein stability.

[0420] As might be expected, development of liquid formulations containing preservatives are more challenging than lyophilized formulations. Freeze-dried products can be lyophilized without the preservative and reconstituted with a preservative containing diluent at the time of use. This shortens the time for which a preservative is in contact with the protein, significantly minimizing the associated stability risks. With liquid formulations, preservative effectiveness and stability should be maintained over the entire product shelf-life (about 18 to 24 months). An important point to note is that preservative effectiveness should be demonstrated in the final formulation containing the active drug and all excipient components.

[0421] The antibody construct of the invention generally will be designed for specific routes and methods of administration, for specific administration dosages and frequencies of administration, for specific treatments of specific diseases, with ranges of bio-availability and persistence, among other things. Formulations thus may be designed in accordance with the invention for delivery by any suitable route, including but not limited to orally, aurally, opthalmically, rectally, and vaginally, and by parenteral routes, including intravenous and intraarterial injection, intramuscular injection, and subcutaneous injection.

[0422] Once the pharmaceutical composition has been formulated, it may be stored in sterile vials as a solution, suspension, gel, emulsion, solid, crystal, or as a dehydrated or lyophilized powder. Such formulations may be stored either in a ready-to-use form or in a form (e.g., lyophilized) that is reconstituted prior to administration. The invention also provides kits for producing a single-dose administration unit. The kits of the invention may each contain both a first container having a dried protein and a second container having an aqueous formulation. In certain embodiments of this invention, kits containing single and multi-chambered pre-filled syringes (e.g., liquid syringes and lyosyringes) are provided. The therapeutically effective amount of an antibody construct of the invention protein-containing pharmaceutical composition to be employed will depend, for example, upon the therapeutic context and objectives. One skilled in the art will appreciate that the appropriate dosage levels for treatment will vary depending, in part, upon the molecule delivered, the indication for which the antibody construct of the invention is being used, the route of administration, and the size (body weight, body surface or organ size) and/or condition (the age and general health) of the patient. In certain embodiments, the clinician may titer the dosage and modify the route of administration to obtain the optimal therapeutic effect. A typical dosage may range from about 0.1 pg/kg to up to about 30 mg/kg or more, depending on the factors mentioned above. In specific embodiments, the dosage may range from 1.0 pg/kg up to about 20 mg/kg, optionally from 10 pg/kg up to about 10 mg/kg or from 100 pg/kg up to about 5 mg/kg.

[0423] A therapeutic effective amount of an antibody construct of the invention preferably results in a decrease in severity of disease symptoms, in increase in frequency or duration of disease symptom-free periods or a prevention of impairment or disability due to the disease affliction. For treating CDH19-expressing tumors, a therapeutically effective amount of the antibody construct of the invention, e.g. an anti-CDH19/CD3 antibody construct, preferably inhibits cell growth or tumor growth by at least about 20%, at least about 40%, at least about 50%, at least about 60%, at least about 70%, at least about 80%, or at least about 90% relative to untreated patients. The ability of a compound to inhibit tumor growth may be evaluated in an animal model predictive of efficacy in human tumors.

[0424] Pharmaceutical compositions may be administered using a medical device. Examples of medical devices for administering pharmaceutical compositions are described in U.S. Pat. Nos. 4,475,196; 4,439,196; 4,447,224; 4,447, 233; 4,486,194; 4,487,603; 4,596,556; 4,790,824; 4,941,880; 5,064,413; 5,312,335; 5,312,335; 5,383,851; and 5,399,163, all incorporated by reference herein.

[0425] In one embodiment the invention provides the antibody construct of the invention or produced according to the process of the invention for use in the prevention, treatment or amelioration of a melanoma disease or metastatic melanoma disease.

[0426] The invention also provides a method for the treatment or amelioration of a melanoma disease or metastatic melanoma disease, comprising the step of administering to a subject in need thereof the antibody construct of the invention or produced according to the process of the invention.

[0427] In a preferred embodiment method of use of the invention the melanoma disease or metastatic melanoma disease is selected from the group consisting of superficial spreading melanoma, lentigo maligna, lentigo maligna melanoma, acral lentiginous melanoma and nodular melanoma.

[0428] In a further embodiment, the invention provides a kit comprising an antibody construct of the invention, or produced according to the process of the invention, a vector of the invention, and/or a host cell of the invention.

[0429] It should be understood that the inventions herein are not limited to particular methodology, protocols, or reagents, as such can vary. The discussion and examples provided herein are presented for the purpose of describing particular embodiments only and are not intended to limit the scope of the present invention, which is defined solely by the claims. All publications and patents cited throughout the text of this specification (including all patents, patent applications, scientific publications, manufacturer's specifications, instructions, etc.), whether supra or infra, are hereby incorporated by reference in their entirety. Nothing herein is to be construed as an admission that the invention is not entitled to antedate such disclosure by virtue of prior invention. To the extent the material incorporated by reference contradicts or is inconsistent with this specification, the specification will supersede any such material.

### EXAMPLES

[0430] The following examples are provided for the purpose of illustrating specific embodiments or features of the present invention. These examples should not be construed as to limit the scope of this invention. The examples are included for purposes of illustration, and the present invention is limited only by the claims.

### Example 1—Fully Human Monoclonal Antibodies Against CDH19

[0431] 1.1 Immunization:

[0432] Fully human antibodies to Cadherin-19 (CDH19) were generated using XENOMOUSE® technology, transgenic mice engineered to express diverse repertoires of fully human IgGκ and IgGλ antibodies of the corresponding isotype. (U.S. Pat. Nos. 6,114,598; 6,162,963; 6,833,268; 7,049,426; 7,064,244, which are incorporated herein by reference in their entirety; Green et al., 1994, Nature Genetics 7:13-21; Mendez et al., 1997, Nature Genetics 15:146-156; Green and Jakobovitis, 1998, J. Ex. Med. 188:483-495; Kellermann and Green, Current Opinion in Biotechnology 13, 593-597, 2002).

[0433] Mice were immunized with multiple forms of Cadherin-19 immunogen, including: (1) full length human and cynomologous (“cyno”) monkey cadherin-19, (2) secreted Cadherin-19 ecto-domain (amino acids 1-596), and (3) a truncated membrane bound form of human cadherin-19 (amino acids 1-624). Mice were immunized over a period of 8 to 10 weeks with a range of 16-18 boosts.

[0434] Sera were collected at approximately 5 and 9 weeks after the first injection and specific titers were determined by FACs staining of recombinant Cadherin-19 receptor transiently expressed on CHO-S cells. A total of 37 animals were identified with specific immune responses, these animals were pooled into 3 groups and advanced to antibody generation.

[0435] 1.2 Preparation of Monoclonal Antibodies

[0436] Animals exhibiting suitable titers were identified, and lymphocytes were obtained from draining lymph nodes and, if necessary, pooled for each cohort. Lymphocytes were dissociated from lymphoid tissue by grinding in a suitable medium (for example, Dulbecco's Modified Eagle Medium (DMEM); obtainable from Invitrogen, Carlsbad, Calif.) to release the cells from the tissues, and suspended in DMEM. B cells were selected and/or expanded using standard methods, and fused with suitable fusion partner using techniques that were known in the art.

[0437] After several days of culture, the hybridoma supernatants were collected and subjected to screening assays as detailed in the examples below, including confirmation of binding to human and cynomologous monkey as well as the ability to kill cell lines in secondary antibody-drug conjugate Bioassays. Hybridoma lines that were identified to have the binding and functional properties of interest were then further selected and subjected to standard cloning and subcloning techniques. Clonal lines were expanded in vitro, and the secreted human antibodies obtained for analysis and V gene sequencing was performed.

[0438] 1.3 Selection of Cadherin-19 Receptor Specific Binding Antibodies by FMAT

[0439] After 14 days of culture, hybridoma supernatants were screened for CDH19-specific monoclonal antibodies by Fluorometric Microvolume Assay Technology (FMAT) (Applied Biosystems, Foster City, Calif.). The supernatants were screened against adherent CHO cells transiently transfected with human Cadherin-19 and counter screened against CHO cells transiently transfected with the same expression plasmid that did not contain the Cadherin-19 gene.

[0440] After multiple screening campaigns, a panel of 1570 anti-Cadherin-19 binding hybridoma lines were identified and advanced to further characterization assays.

### Example 2—Assessment of Fully Human Monoclonal Antibodies Against CDH19

[0441] 2.1 Additional Binding Characterization by Flow Cytometry (FACs)

[0442] FACS binding assays were performed to evaluate the binding of the anti-Cadherin-19 receptor specific antibodies to endogenous Cadherin-19 receptor expressed on the CHL-1 tumor cell lines. In addition, cross-reactive binding to murine and cynomologous monkey Cadherin-19 orthologues was also evaluated by FACs using recombinant forms of the various receptors transiently expressed on 293T cells.

[0443] FACs assays were performed by incubating hybridoma supernatants with 10,000 to 25,000 cells in PBS/2% Fetal bovine serum/2 mM Calcium Chloride at 4° C. for one hour followed by two washes with PBS/2% Fetal bovine serum/2 mM Calcium Chloride. Cells were then treated with florochrome-labeled secondary antibodies at 4° C. followed by one wash. The cells were resuspended in 50 μl of PBS/2% FBS and antibody binding was analyzed using a FACSCalibur™ instrument.

[0444] 2.2 Antibody Drug Conjugate Screening of Fully Human Antibodies Derived from XenoMouse® Hybridomas

[0445] Cell killing through antibody drug conjugates requires the delivery of the conjugate into a cell through internalization and the catabolism of the drug-conjugate into a form that it is toxic to the cell. To identify antibodies with these properties, CDH19-positive cell lines (Colo-699 or CHL-1) were seeded at low cell densities and allowed to adhere overnight in a 384 well plate. XENOMOUSE® hybridoma samples containing fully human anti-CDH19 antibodies were then added to these cells in the presence of a high concentration of a goat anti-human Fc monovalent Fab conjugated with DM1 (DM1-Fab) at a relatively low drug-antibody ratio (DAR) (˜1.3). The cells were incubated for 96 hours at 37° C. and 5% CO₂ in the presence of the antibody samples and the DM1-Fab. At the end of this time, the cell viability was assessed using the CellTiter-Glo® Luminescent Cell Viability reagent (Promega) according to manufacturer's recommendations.

[0446] An example of the cell viability data with the Colo-699 cells is shown in FIG. 1 and FIG. 2. The antibodies capable of delivering the DM1-Fab to the cells and inhibiting the cell growth read out with a lower luminescent signal (RLU). The top antibodies of interest from this screen are observed in the lower left corner of FIG. 1 and are denoted as open circles. These antibodies were taken forward into a cell viability assay on CHL-1 cells. The average cell viability data from the CHL-1 assay is plotted against the average cell viability data from the Colo-699 assay (FIG. 2). The antibodies that had activity on both the Colo-699 and the CHL-1 cells are denoted as open circles on the left-hand side of the FIG. 2.

[0447] This assay was run concurrently with the FACs antibody binding assay above (2.2), and the results from these two studies were used to select the antibodies for further characterization. In total, 1570 antibodies were run through these cell based viability assays and approximately 44 antibodies were selected on the bases of in vitro cell killing and/or antibody binding for sub-cloning, V gene sequencing and expressed in recombinant form for further characterization assays as described below.

[0448] These 44 antibodies were again assayed as in Example 2 and 19 antibodies were selected that contained unique sequences. Of these 19 antibodies, 18 antibodies were analyzed and their properties characterized in Table 2 below. The data in this table was generated using FACs binding on recombinant human and cynomologous CDH-19, +/−Calcium (Ca⁺²⁾ binding data on 293/CDH-19 transfectants, binding to endogenous CDH-19 on CHL-1 and Colo699 tumor cells and competition with the antibody designated as 4A9 in the table. These experiments provided the further characterizations for the grouping of these antibodies into 5 groups or bins.

TABLE 2
Binning of Lead panel using Antibody Binding Information

| Bin | LMR Sequence/ | Clone | |
|---|---|---|---|
| ID | Ab ID | ID | Bin Characteristics |
| 1 | 13589 | 4A9 | High Endogenous binding, Calcium |
| | 13591 | 4F7 | insensitive, sequence clustered, moderate |
| | | | cyno complete 4A9 competitor |
| 2 | 13885 | 19B5 | High Endogenous binding, Calcium |
| | 13880 | 25F8 | insensitive, sequence clustered, Good cyno, |
| | 13882 | 26D1 | partial 4A9 competitor |
| | 13881 | 26F12=27B3 | |
| | 13878 | 16H2=20D3=23E7 | |
| | 13879 | 22D1 | |
| 3 | 13877 | 22G10 | High Endogenous binding, moderate 293 |
| | 13874 | 17H8=23B6=28D10 | binding, Calcium insensitive, 2 sequence |
| | 13883 | 25G10 | clusters, moderate cyno, partial |
| | 13875 | 16C1 | 4A9 competitor, 22G10 best binder in bin. |
| 4 | 13590 | 4B10 | Low Endogenous and recombinant binding, |
| | 13586 | 4F3 | Calcium sensitive, sequence diverse group, |
| | 13592 | 4A2 | comparable cyno, No 4A9 competition |
| | 13884 | 23A10 | |
| | 13588 | 2G6 | |
| 5 | 13876 | 16A4 | Best endogenous binder, moderate |
| | | | recombinant binder, calcium insensitive, very |
| | | | weak cyno, No 4A9 competition. |

[0449] Of these 18 antibodies. 8 antibodies were selected for further analysis of their epitope binding as described below. At least one representative antibody from each bin was selected for further analysis.

### Example 3—Epitope Prediction

[0450] Epitope Prediction by 4A9 Antibody Competition and by Human/Mouse Cadherin-19 Chimeras

[0451] A 4A9 binding competition method was developed to identify antibodies that compete with 4A9 binding. In 96-well V-bottom plates (Sarstedt #82.1583.001), 50,000 transiently transfected 293T cells were incubated with 5 ug/ml of purified anti-CDH19 antibodies for 1 hr at 4° C. followed by one wash with PBS/2% FBS. 25 μl of 5 pg/ml Alexa647-labelled 4A9 was then added to each well and the plates incubated for 1 hour at 4° C. Cells were then washed two times and the amount of cell associated Alexa647-labelled 4A9 was quantitated by flow cytometry.

[0452] The experiments included negative controls consisting of PBS/2% FBS only. The average signal observed in these negative control experiments was adopted as the maximum possible signal for the assay. Antibodies were compared to this maximum signal and a percent inhibition was calculated for each well (% Inhibition=(1−(FL4 Geomean with the anti-CDH19 antibodies/Maximum FL4 Geomean signal)).

[0453] Domain binding was determined by flow cytometry as above on 293T cells transiently transfected with plasmids consisting of single or dual human CDH19 cadherin repeat domain replacements into the mouse Cadherin19 backbone cloned into the pTT5 expression vector immediately preceded by native human or murine CDH19 leader sequences and a Flag tag (SEQ ID NO: 968). The experiment included assaying the anti-CDH19 antibodies against mouse Cadherin19 to determine suitability for binning on these human/mouse chimeras.

[0454] The data from these experiments are presented in the Table below entitled as follows:

TABLE 3
Calcium Sensitive Binding and Epitope Prediction Summary

| | | | | | Hu | | Hu | | Hu | | Hu | | Mu | |
|---|---|---|---|---|---|---|---|---|---|---|---|---|---|---|
| | | | Ca2+ | Competes | EC1- | Hu | EC1- | Hu | EC2- | Hu | EC4- | Hu | EC1- | Predicted |
| Clone | | | Sensitive | with 4A9 | 5 | EC1 | 2 | EC2 | 3 | EC3 | 5 | EC5 | 5 | Epitope |
| ID | Ab ID | Bin | Binding | (13589) | A | B | C | D | E | F | G | H | I | Region |
| 4A9 | 13589 | 1 | No | Yes | + | + | + | − | − | − | − | − | − | 44-141 |
| | 14056 | 1 | No | Yes | + | + | + | − | − | − | − | − | − | |
| | 14057 | 1 | No | Yes | + | + | + | − | − | − | − | − | − | |
| 25F8 | 13880 | 2 | No | Yes | + | + | + | − | − | − | − | − | − | |
| | 14094 | 2 | No | Yes | + | + | + | − | − | − | − | − | − | |
| | 14096 | 2 | No | Yes | + | + | + | − | − | − | − | − | − | |
| 26D1 | 13882 | 2 | No | Yes | + | + | + | − | − | − | − | − | − | |
| | 14088 | 2 | No | Yes | + | + | + | − | − | − | − | − | − | |
| 17H8 | 13874 | 3 | No | Yes | + | + | + | − | − | − | − | − | − | |
| | 14045 | 3 | No | Yes | + | + | + | − | − | − | − | − | − | |
| | 14048 | 3 | No | Yes | + | + | + | − | − | − | − | − | − | |
| 4A2 | 13592 | 4 | Yes | No | + | − | − | − | + | + | − | − | − | 250-364 |
| | 14026 | 4 | Yes | No | + | − | − | − | + | + | − | − | − | |
| 4B10 | 13590 | 4 | Yes | No | + | − | − | − | + | + | − | − | − | |
| | 14055 | 4 | Yes | No | + | − | − | − | + | + | − | − | − | |
| | 14054 | 4 | Yes | No | + | − | − | − | + | + | − | − | − | |
| 2G6 | 13588 | 4 | Yes | No | + | + | + | + | + | + | + | + | + | un- |
| | 14304 | 4 | Yes | No | + | + | + | + | + | + | + | + | + | assignable |
| | 14039 | 4 | Yes | No | + | + | + | + | + | + | + | + | + | |
| 16A4 | 13876 | 5 | No | No | + | + | + | − | − | − | − | − | − | Unassigned |
| | 14071 | 5 | No | No | + | + | + | − | − | − | − | − | − | complex |
| | | | | | | | | | | | | | | epitope |

| | | | | | | | | | |
|---|---|---|---|---|---|---|---|---|---|
| Rat anti-FLAG | + | + | + | + | + | + | + | + | + |

Legend Table 3
Human and/or murine chimera constructs
A = huCDH19(44-772) (see SEQ ID NO: 944)
B = huCDH19(44-141)::muCDH19(140-770) (see SEQ ID NO: 952)
C = huCDH19(44-249)::muCDH19(248-770) (see SEQ ID NO: 954)
D = muCDH19(44-139)::huCDH19(142-249)::muCDH19(248-770) (see SEQ ID NO: 956)
E = muCDH19(44-139)::huCDH19(142-364)::muCDH19(363-770) (see SEQ ID NO: 958)
F = muCDH19(44-247)::huCDH19(250-364)::muCDH19(363-770) (see SEQ ID NO: 960)
G = muCDH19(44-362)::huCDH19(365-772) (see SEQ ID NO: 962)
H = muCDH19(44-461)::huCDH19(464-772) (see SEQ ID NO: 964)
I = muCDH19(44-770) (see SEQ ID NO: 966)

### Epitope Prediction by Human/Chicken Cadherin-19 Chimeras

[0455] Domain binding was determined by flow cytometry on 293T cells transiently transfected with plasmids consisting of single human CDH19 cadherin repeat domain replacements into the chicken Cadherin19 backbone cloned into the pTT5 expression vector immediately preceded by native human or chicken CDH19 leader sequences and a Flag tag. The experiment included assaying a subset of anti-CDH19 antibodies against chicken Cadherin19 to determine suitability for binning on these human/chicken chimeras.

[0456] The following binding assay was completed in presence of 2 mM CaCl2). In 96-well V-bottom plates (Costar 3897), 50,000 transiently transfected 293T cells were incubated with 5 ug/ml of purified anti-CDH19 antibodies for 1 hr at 4° C. followed by two washes with PBS/2% FBS. 50 μl of 5 pg/ml Alexa647-labelled anti-human IgG secondary antibody (Jackson Immuno 109-605-098) and 2 ug/ml 7AAD (Sigma A9400) was then added to each well and the plates incubated for 15 minutes at 4° C. Cells were then washed one time and the amount of cell associated Alexa647-labelled Ab was quantitated by flow cytometry. The experiments included mock transfected controls. The data from these experiments are presented in the Table below, n.d.=not determined.

TABLE 4
Antibody Bin C Epitope Prediction Summary

| | | | Hu | Ck | Hu | Hu | Hu | Hu | |
|---|---|---|---|---|---|---|---|---|---|
| | | | EC1-5 | EC1-5 | EC1 | EC2 | EC3 | EC5 | Predicted |
| Clone ID | Ab. ID | Bin | A | J | K | L | M | O | Epitope Region |
| 4A9 | 13589 | 1 | + | − | + | − | − | − | 44-141 |
| 26F12 | 13881 | 2 | + | − | + | − | − | − | Bin A |
| 25F8 | 14096 | 2 | + | − | + | − | − | − | |
| 26D1 | 13882 | 2 | + | − | + | − | − | − | |
| 17H8 | 13874 | 3 | + | − | + | − | − | − | |
| 16A4 | 14071 | 5 | + | − | + | − | − | − | |
| 4A2 | 13592 | 4 | + | − | − | − | + | − | 250-364 |
| 4B10 | 13590 | 4 | + | − | − | − | + | − | Bin B |
| 2G6 | 13588 | 4 | + | − | − | − | + | − | |
| 23A10 | 14077 | 4 | + | − | − | − | + | − | |

| | | | | | | | |
|---|---|---|---|---|---|---|---|
| Rat anti-FLAG | + | + | + | + | + | + | control |

Positive Binding (+)
Negative Binding (−)
Legend Table 4
Human and/or chicken chimera constructs
A = huCDH19(44-772) (see SEQ ID NO: 944)
J = ckCDH19(44-776) (see SEQ ID NO: 1451)
K = huCDH19(44-141)::ckCDH19(142-776) (see SEQ ID NO: 1452)
L = ckCDH19(44-141)::huCDH19(142-249)::ckCDH19(250-776) (see SEQ ID NO: 1453)
M = ckCDH19(44-249)::huCDH19(250-364)::ckCDH19(365-776) (see SEQ ID NO: 1454)
N = ckCDH19(44-364)::huCDH19(365-463)::ckCDH19(469-776) (see SEQ ID NO: 1455)
O = ckCDH19(44-468)::huCDH19(464-772) (see SEQ ID NO: 1456)

### Epitope Prediction by Macaque/Dog or Rat/Macaque Cadherin-19 Chimeras

[0457] Domain binding was determined by flow cytometry on 293T cells transiently transfected with plasmids consisting of rhesus macaque CDH19 cadherin repeat domain 1 or segments domain 1 (designated EC1a, EC1b, EC1c) replacements into the dog Cadherin19 backbone, or rat CDH19 cadherin repeat domain 2 replacement into the rhesus Cadherin19 backbone cloned into the pTT5 expression vector immediately preceded by native rhesus or canine CDH19 leader sequences and a Flag tag. The experiment included assaying a subset of anti-CDH19 antibodies against dog, rat and macaque Cadherin19 to determine suitability for binning on these macaque/dog and rat/rhesus chimeras.

[0458] The following binding assay was completed in presence of 2 mM CaCl2. In 96-well V-bottom plates (Costar 3897), 50,000 transiently transfected 293T cells were incubated with 5 ug/ml of purified anti-CDH19 antibodies for 1 hr at 4° C. followed by two washes with PBS/2% FBS. 50 μl of 5 pg/ml Alexa647-labelled anti-human IgG secondary antibody (Jackson Immuno 109-605-098) and 2 ug/ml 7AAD (Sigma A9400) was then added to each well and the plates incubated for 15 minutes at 4° C. Cells were then washed one time and the amount of cell associated Alexa647-labelled Ab was quantitated by flow cytometry. The experiments included mock transfected controls. The data from these experiments are presented in the Table below, n.d.=not determined.

TABLE 5
Antibody BinA Epitope prediction Summary

| | | | Rh | Ca | rh | rh | rh | ra | Ra | Predicted |
|---|---|---|---|---|---|---|---|---|---|---|
| | | | EC1-5 | EC1-5 | EC1 | EC1a | EC1b | EC2 | EC1-5 | Epitope |
| Clone ID | Ab. ID | Bin | P | Q | R | S | T | V | W | Region |
| 4A9 | 13589 | 1 | + | − | + | − | − | − | − | 44-141 |
| | | | | | | | | | | Bin A.1 |
| 26F12 | 13881 | 2 | + | − | + | + | + | − | − | 44-141 |
| 25F8 | 14096 | 2 | + | − | + | + | + | − | − | Bin A.2 |
| 26D1 | 13882 | 2 | + | − | + | + | + | − | − | (44-114) |
| 17H8 | 13874 | 3 | + | − | + | + | − | − | − | 44-141 |
| 16A4 | 14071 | 5 | + | − | + | + | − | n.d. | + | Bin A.3 |
| | | | | | | | | | | (44-65) |
| 4A2 | 13592 | 4 | + | − | n.d. | n.d. | n.d. | n.d. | + | 250-364 |
| 4B10 | 13590 | 4 | + | + | n.d. | n.d. | n.d. | n.d. | + | Bin B |
| 2G6 | 13588 | 4 | + | + | n.d. | n.d. | n.d. | n.d. | + | |
| 23A10 | 14077 | 4 | + | + | n.d. | n.d. | n.d. | n.d. | + | |

| | | | | | | | |
|---|---|---|---|---|---|---|---|
| Rat anti-FLAG | + | + | + | + | + | + | + |

Positive Binding (+)
Negative Binding (−)
Not Determined (n.d.)
Legend Table 5
Rhesus macaque, dog, and/or rat chimera constructs
P = rhCDH19(44-772) (see SEQ ID NO: 1457)
Q = caCDH19(44-770) (see SEQ ID NO: 1458)
R = rhCDH19(44-141)::caCDH19(141-770) (see SEQ ID NO: 1459)
S = rhCDH19(44-65)::caCDH19(65-770) (see SEQ ID NO: 1460)
T = caCDH19(44-87)::rhCDH19(89-114)::caCDH19(115-770) (see SEQ ID NO: 1461)
U = caCDH19(44-120)::rhCDH19(122-137)::caCDH19(137-770) (see SEQ ID NO: 1462)
V = rhCDH19(44-141)::raCDH19(140-247)::rhCDH19(250-772) (see SEQ ID NO: 1463)
W = raCDH19(44-770) (see SEQ ID NO: 1464)

[0459] The data summarized in table 5 allowed for segregating the binder of Bin A 44-141 into the following subgroups:

### Bin A.1 44-141

### Bin A.2 44-141 (44-114)

### Bin A.3 44-141 (44-65)

### Epitope Prediction by Rat/Mouse or Human/Mouse Cadherin-19 Chimeras

[0460] Domain binding was determined by flow cytometry on 293T cells transiently transfected with plasmids consisting of rat CDH19 cadherin repeat domain 3 substitutions (designated EC3a, EC3b) or human CDH19 cadherin repeat domain 3 substitution (designated EC3c) into the mouse Cadherin19 backbone cloned into the pTT5 expression vector immediately preceded by native mouse CDH19 leader sequence and a Flag tag. The experiment included assaying a subset of anti-CDH19 antibodies against human, rat and mouse Cadherin19 to determine suitability for binning on these rat/mouse and human/mouse chimeras.

[0461] The following binding assay was completed in presence of 2 mM CaCl2). In 96-well V-bottom plates (Costar 3897), 50,000 transiently transfected 293T cells were incubated with 5 ug/ml of purified anti-CDH19 antibodies for 1 hr at 4° C. followed by two washes with PBS/2% FBS. 50 μl of 5 pg/ml Alexa647-labelled anti-human IgG secondary antibody (Jackson Immuno 109-605-098) and 2 ug/ml 7AAD (Sigma A9400) was then added to each well and the plates incubated for 15 minutes at 4° C. Cells were then washed one time and the amount of cell associated Alexa647-labelled Ab was quantitated by flow cytometry. The experiments included mock transfected controls. The data from these experiments are presented in the Table below, n.d.=not determined.

TABLE 6
Antibody Bin B Epitope Prediction Summary

| | | | Hu | Mo | Ra | Ra | Ra | Hu | Predicted |
|---|---|---|---|---|---|---|---|---|---|
| | | | EC1-5 | EC1-5 | EC1-5 | EC3c | EC3b | EC3a | Epitope |
| Clone ID | Ab. ID | Bin | A | I | W | X | Y | Z | Region |
| 4A9 | 13589 | 1 | + | − | − | n.d. | n.d. | n.d. | 44-141 |
| 26F12 | 13881 | 2 | + | − | − | n.d. | n.d. | n.d. | Bin A |
| 25F8 | 14096 | 2 | + | − | − | n.d. | n.d. | n.d. | |
| 26D1 | 13882 | 2 | + | − | − | n.d. | n.d. | n.d. | |
| 17H8 | 13874 | 3 | + | − | − | n.d. | n.d. | n.d. | |
| 16A4 | 14071 | 5 | + | − | + | n.d. | n.d. | n.d. | |
| 4A2 | 13592 | 4 | + | − | + | + | − | − | 250-364 |
| 4B10 | 13590 | 4 | + | − | + | + | − | − | (324-327) |
| | | | | | | | | | Bin B.2 |
| 2G6 | 13588 | 4 | + | + | + | + | + | + | 250-364 |
| 23A10 | 14077 | 4 | + | + | + | n.d. | n.d. | n.d. | Bin B.1 |

| | | | | | | | |
|---|---|---|---|---|---|---|---|
| Rat anti-FLAG | + | + | + | + | + | + | control |

Positive Binding (+)
Negative Binding (−)
Not Determined (n.d.)
Legend Table 6
Rat/mouse or human/mouse chimera constructs
A = huCDH19(44-772) (see SEQ ID NO: 944)
I = muCDH19(44-770) (see SEQ ID NO: 966)
W = raCDH19(44-770) (see SEQ ID NO: 1464)
X = muCDH19(44-323)::raCDH19(324-327)::muCDH19(328-770) (see SEQ ID NO: 1465)
Y = muCDH19(44-770)::raCDH19(290, 299, 308) (see SEQ ID NO: 1466)
Z = muCDH19(44-770)::huCDH19(271) (see SEQ ID NO: 1467)

[0462] The data summarized in table 6 allowed for segregating the binder of Bin B 250-364 into the following subgroups:

### Bin B.1 250-364

[0463] Bin B.2 250-364 (324-327) by rodent numeration as referenced in table 6, corresponding to residues (326-329) within human and macaque CDH19

### Example 4—Hotspot/Covariant Mutants

[0464] A total of 18 antibodies were analyzed for potential hotspots and covariance violations. The designed variants (shown below) outline amino acid substitutions capable of reducing and/or avoiding isomerization, deamidation, oxidation, covariance violations, and the like. The 80 engineered variants together with the 15 parental antibodies, thus totaling 95 sequences, were taken forward to the cloning, expression, and purification processes. Site-directed mutagenesis was performed on the engineered variants in a 96-well format. The parental antibodies and engineered variants were expressed by high throughput transient transfection in HEK 293-6E cells, purified using a modified AKTA auto-sampler and assayed for activity and biophysical characteristics. The 3 parental antibodies that had either free (unpaired) Cys or N-glycosylation site were not taken forward in this process. Those were replaced with the engineered version of the parental antibodies. The designed variants outline amino acid substitutions capable of reducing and/or avoiding isomerization, deamidation, oxidation, covariance violations, immunogenicity and the like. It will be appreciated that these variant sequences are examples of engineered antibodies within the meaning of the present application but single point and/or multiple point mutations can be combined in any combinatorial manner in order to arrive at a final desired antigen binding molecule or antibody.

### Example 5—CDH19 mRNA Expression Pattern

[0465] RNA was extracted from individual patient tissues representing tumor (>70% tumor content by cell count) or normal (0% tumor content by cell count). Individual tissues were homogenized using TisssueLyzer (Qiagen, Valencia, Calif.) and total RNA extracted and purified by the mirVana total RNA extraction kit (Life Technologies, Foster City, Calif.). RNA quality and quantity checked by NanoDrop (NanoDrop, Wilmington, Del.) spectrophotometer readings and Bioanalyzer RNA profiling (Agilient Technologies, Santa Clara, Calif.). RNA was DNAse treated with DNA-free kit (Life Technologies, Foster City, Calif.) and reverse transcribed according to manufacturer's specifications using random hexamers in the High Capacity cDNA Reverse Transcription Kit (Life Technologies, Foster City, Calif.). Quantitative Real Time Polymerase Chain Reaction (qRT-PCR) was performed on cDNA using primers to CDH19, probeset Hs00253534_m1, (Life Technologies, Foster City, Calif.) or the housekeeping gene human ACTB (primers CCT GGC ACC CAG CAC AA; GCC GAT CCA CAC GGA GTA CT; probe ATC AAG ATC ATT GCT CCT CCT GAG CG). 10 μL qRT-PCR reaction components; 1.0 ng/μL cDNA, 2×Universal PCR Master Mix (Life Technologies, Foster City, Calif.), gene expression assay (ACTB; 75 nM primers, 150 nM probe. EPOR; 300 nM primers, 250 nM probe) Following the qRT-PCR amplification program: (1) activation at 50° C. for 2 min; (2) denaturation at 95° C. for 10 min; (3) amplification 40 cycles at 95° C. for 15 s and 60° C. for 1 min with fluorescence capture at each step (ABI PRISM 7900HT Sequence Detection Systems, Applied Biosystems). Threshold cycle values (C_{T}) were determined, using Sequence Detector software version 2.3 (Applied Biosystems) and transformed to 2^{-ΔCT} for relative expression of CDH19 specific transcript to ACTB. The results are shown in FIG. 3. Of 54 unique metastatic and primary melanoma samples, the majority can be seen to overexpress CDH19 mRNA relative to the expression in samples from normal tissue.

### Example 6—CDH19 Protein Expression

[0466] Expression of CDH19 protein was analyzed in human tumor samples by IHC and the results are shown in FIG. 4. Samples were fixed in 10% neutral buffered formalin for 24 hours, dehydrated and paraffin embedded. 4 μm sections were cut. Sections were deparaffinized first and then heated in DIVA Decloaker solution (Biocare) for 40 minutes for antigen retrieval. Remaining IHC steps were performed at room temperature in a DAKO Autostainer. Sections were incubated for 10 minutes with Peroxidazed 1 (Biocare) to block endogenous peroxidase, followed by incubation for 10 minutes with background sniper (Biocare) to reduce nonspecific background. Section were incubated for 60 minutes with CDH19 antibody (Novo Biologicals, Catalog # H00028513-B01P) at 5 pg/ml, then incubated for 30 minutes with Envision+ HRP anti-mouse polymer (DAKO), followed by DAB+(DAKO) for 5 minutes. Sections were counterstained with hematoxylin (DAKO) approximately for 1 minute. CDH19 expression could be detected in 62% of tumors examined (staining intensity ≥1+ in 101 of 162 samples). 51% of the tumor samples demonstrated medium to high expression (staining intensity of 2+ to 3+ in 83 of 162 samples). CDH19 showed dense and distinct membrane staining in many samples, although in some tumors heterogeneity was noted.

### Example 7—Selection of Model Cell Lines

[0467] Tumor cell lines were analyzed by flow cytometry and IHC to identify model systems with CDH19 expression similar to human tumors. Human anti-huCDH19 IgG4 antibody 4A2 was purified directly from hybridoma conditioned media. For flow cytometry, 2×10⁵ cells were incubated with 200 nM of the CDH19 4A2 antibody that was conjugated to PE at a 1:1 ratio. The incubation and subsequent wash steps were performed in the presence of 1.2 mM calcium. A tube of QuantiBRITE PE lyophilized beads with four levels of PE (BD, cat #340495) was simultaneously prepared according to the manufacturer's instructions. The beads were analyzed by flow cytometry to generate a standard curve. The PE median values obtained from the melanoma lines after FACS analysis were then calibrated against the standard curve to calculate the antibodies bound per cell (ABC), which provides an estimate of the number of receptors on each cell. IHC was performed as described in Example 6 and the results are provided in FIG. 5. The melanoma cell line CHL-1 expresses about 10,000 CDH19 molecules on the cell surface, while Colo699 cells express about 5,000 receptors.

[0468] Both cell lines represent tumors with medium to high expression levels based on IHC. Expression in A2058 is very low, while LOX cells do not express any detectable CDH19 protein.

### Example 8

[0469] Bispecific Binding and Interspecies Cross-Reactivity

[0470] For confirmation of binding to human CDH19 and to human and macaque CD3, bispecific antibodies were tested by flow cytometry using indicated cell lines. L1.2 transfected with human CDH19, the human melanoma cell lines CHL-1 and A2058 expressing native human CDH19, CD3-expressing human T cell leukemia cell line HPB-ALL (DSMZ, Braunschweig, ACC483) and the CD3-expressing macaque T cell line 4119LnPx (Knappe A, et al., Blood, 2000, 95, 3256-3261) were used as antigen positive cell lines. Moreover, untransfected L1.2 cells were used as negative control.

[0471] For flow cytometry 200,000 cells of the respective cell lines were incubated for 30 min on ice with 50 μl of purified bispecific antibody at a concentration of 5 pg/ml. The cells were washed twice in PBS/2% FCS and binding of the constructs was detected with a murine PentaHis antibody (Qiagen; diluted 1:20 in 50 μl PBS/2% FCS). After washing, bound PentaHis antibodies were detected with an Fc gamma-specific antibody (Dianova) conjugated to phycoerythrin, diluted 1:100 in PBS/2% FCS. Samples were measured by flow cytometry on a FACSCanto II instrument and analyzed by FACSDiva software (both from Becton Dickinson).

[0472] The CDH19/CD3 bispecific antibodies stained L1.2 cells transfected with human CDH19, the human CDH19-expressing melanoma cell lines CHL-1 and A2058 as well as human and macaque T cells. Moreover, there was no staining of untransfected L1.2 cells (see FIG. 6).

### Example 9

[0473] Cytotoxic Activity

[0474] FACS-Based Cytotoxicity Assay with Unstimulated Human PBMC

[0475] Isolation of Effector Cells

[0476] Human peripheral blood mononuclear cells (PBMC) were prepared by Ficoll density gradient centrifugation from enriched lymphocyte preparations (e.g. buffy coats), a side product of blood banks collecting blood for transfusions. Buffy coats were supplied by a local blood bank and PBMC were prepared on the same day of blood collection. After Ficoll density centrifugation and extensive washes with Dulbecco's PBS (Gibco), remaining erythrocytes were removed from PBMC via incubation with erythrocyte lysis buffer (155 mM NH₄Cl, 10 mM KHCO₃, 100 μM EDTA). Platelets were removed via the supernatant upon centrifugation of PBMC at 100×g. Remaining lymphocytes mainly encompass B and T lymphocytes, NK cells and monocytes. PBMC were kept in culture at 37° C./5% CO₂ in RPMI medium (Gibco) with 10% FCS (Gibco).

[0477] Depletion of CD14⁺ and CD56⁺ Cells

[0478] For depletion of CD14⁺ cells, human CD14 MicroBeads (Milteny Biotec, MACS, #130-050-201) were used, for depletion of NK cells human CD56 MicroBeads (MACS, #130-050-401). PBMC were counted and centrifuged for 10 min at room temperature with 300×g. The supernatant was discarded and the cell pellet resuspended in MACS isolation buffer [80 μL/10⁷ cells; PBS (Invitrogen, #20012-043), 0.5% (v/v) FBS (Gibco, #10270-106), 2 mM EDTA (Sigma-Aldrich, # E-6511)]. CD14 MicroBeads and CD56 MicroBeads (20 μL/10⁷ cells) were added and incubated for 15 min at 4-8° C. The cells were washed with MACS isolation buffer (1-2 mL/10⁷ cells). After centrifugation (see above), supernatant was discarded and cells resuspended in MACS isolation buffer (500 μL/10⁸ cells). CD14/CD56 negative cells were then isolated using LS Columns (Miltenyi Biotec, #130-042-401). PBMC w/o CD14+/CD56+ cells were cultured in RPMI complete medium i.e. RPMI1640 (Biochrom AG, # FG1215) supplemented with 10% FBS (Biochrom AG, # S0115), 1× non-essential amino acids (Biochrom AG, # K0293), 10 mM Hepes buffer (Biochrom AG, # L1613), 1 mM sodium pyruvate (Biochrom AG, # L0473) and 100 U/mL penicillin/streptomycin (Biochrom AG, # A2213) at 37° C. in an incubator until needed.

[0479] Target Cell Labeling

[0480] For the analysis of cell lysis in flow cytometry assays, the fluorescent membrane dye DiOC₁₈ (DiO) (Molecular Probes, # V22886) was used to label human CDH19− as target cells and distinguish them from effector cells. Briefly, cells were harvested, washed once with PBS and adjusted to 10⁶ cell/mL in PBS containing 2% (v/v) FBS and the membrane dye DiO (5 μL/10⁶ cells). After incubation for 3 min at 37° C., cells were washed twice in complete RPMI medium and the cell number adjusted to 1.25×10⁵ cells/mL. The vitality of cells was determined using 0.5% (v/v) isotonic EosinG solution (Roth, #45380).

[0481] Flow Cytometry Based Analysis

[0482] This assay was designed to quantify the lysis of human CDH19-transfected CHO cells in the presence of serial dilutions of CDH19 bispecific antibodies.

[0483] Equal volumes of DiO-labeled target cells and effector cells (i.e., PBMC w/o CD14⁺ cells) were mixed, resulting in an E:T cell ratio of 10:1. 160 μL of this suspension were transferred to each well of a 96-well plate. 40 μL of serial dilutions of the CDH19 bispecific antibodies and a negative control bispecific (an CD3-based bispecific antibody recognizing an irrelevant target antigen) or RPMI complete medium as an additional negative control were added. The bispecific antibody-mediated cytotoxic reaction proceeded for 48 hours in a 7% CO₂ humidified incubator. Then cells were transferred to a new 96-well plate and loss of target cell membrane integrity was monitored by adding propidium iodide (PI) at a final concentration of 1 pg/mL. PI is a membrane impermeable dye that normally is excluded from viable cells, whereas dead cells take it up and become identifiable by fluorescent emission.

[0484] Samples were measured by flow cytometry on a FACSCanto II instrument and analyzed by FACSDiva software (both from Becton Dickinson).

[0485] Target cells were identified as DiO-positive cells. PI-negative target cells were classified as living target cells. Percentage of cytotoxicity was calculated according to the following formula:

$$Cytotoxicity [ \% ] = \frac{{n}_{dead target cells}}{{n}_{target cells}} \times 100$$

$$n = number of events$$

[0486] Using GraphPad Prism 5 software (Graph Pad Software, San Diego), the percentage of cytotoxicity was plotted against the corresponding bispecific antibody concentrations. Dose response curves were analyzed with the four parametric logistic regression models for evaluation of sigmoid dose response curves with fixed hill slope and EC50 values were calculated. The results are shown in FIG. 7.

### Example 10

[0487] In Vivo Tumor Growth Inhibition Experiments

[0488] 5 million Colo699 or CHL-1 tumor cells were admixed with 2.5 million freshly isolated peripheral blood mononuclear cells (PBMC) and injected subcutaneously in the left flank of female athymic nude mice on Day 0. The same day, mice were treated intraperitoneally with either CDH19 BiTE 2G6 or non-specific control BiTE (MEC14) at the indicated doses. Dosing continued daily for the first 10 days post-tumor inoculation.

[0489] Tumor volumes and body weights were measured twice per week using calipers and an analytical scale, respectively.

[0490] The results of experiments with Colo699 or CHL-1 tumor cells are shown in FIGS. 8 and 9.

### SEQUENCE TABLE

TABLE Ia
HEAVY CHAIN CDRs

| Ab | Type | CDR 1 | CDR 2 | CDR 3 |
|---|---|---|---|---|
| 1D10 | NA | AGCTATGGCATGCAC | GTTATATGGTATGATGGAAGT | AGGGCCGGTATAATAGGAAC |
| 2C12 | | SEQ ID NO: 1 | AATAAATACTATGCAGACTCC | TACAGGCTACTACTACGGTA |
| | | | GTGAAGGGC | TGGACGTC |
| | | | SEQ ID NO: 2 | SEQ ID NO: 3 |
| | AA | SYGMH | VIWYDGSNKYYADSVKG | RAGIIGTTGYYYGMDV |
| | | SEQ ID NO: 4 | SEQ ID NO: 5 | SEQ ID NO: 6 |
| 1F10 | NA | AGTGGTGGTTACTACT | TACATCTATTACAGTGGGAGC | GATGGAAGCAGTGGCTGGTA |
| | | GGAGC | ACCTACTACAACCCGTCCCTC | CTTCCAGCAC |
| | | SEQ ID NO: 7 | ACGAGT | SEQ ID NO: 9 |
| | | | SEQ ID NO: 8 | |
| | AA | SGGYYWS | YIYYSGSTYYNPSLTS | DGSSGWYFQH |
| | | SEQ ID NO: 10 | SEQ ID NO: 11 | SEQ ID NO: 12 |
| 2C12_LC#1 | NA | AGCTATGGCATGCAC | GTTATATGGTATGATGGAAGT | AGGGCCGGTATAATAGGAAC |
| | | SEQ ID NO: 13 | AATAAATACTATGCAGACTCC | TACAGGCTACTACTACGGTA |
| | | | GTGAAGGGC | TGGACGTC |
| | | | SEQ ID NO: 14 | SEQ ID NO: 15 |
| | AA | SYGMH | VIWYDGSNKYYADSVKG | RAGIIGTTGYYYGMDV |
| | | SEQ ID NO: 16 | SEQ ID NO: 17 | SEQ ID NO: 18 |
| 2G6_LC#1 | NA | AGCTATGGCATGCAC | TTTATATGGTATGATGGAAGT | AGGGCCGGTATAATAGGAAC |
| | | SEQ ID NO: 19 | AATAAATACTATGCAGACTCC | TATAGGCTACTACTACGGTA |
| | | | GTGAAGGAC | TGGACGTC |
| | | | SEQ ID NO: 20 | SEQ ID NO: 21 |
| | AA | SYGMH | FIWYDGSNKYYADSVKD | RAGIIGTIGYYYGMDV |
| | | SEQ ID NO: 22 | SEQ ID NO: 23 | SEQ ID NO: 24 |
| 2G6 | NA | AGCTATGGCATGCAC | TTTATATGGTATGATGGAAGT | AGGGCCGGTATAATAGGAAC |
| | | SEQ ID NO: 25 | AATAAATACTATGCAGACTCC | TATAGGCTACTACTACGGTA |
| | | | GTGAAGGAC | TGGACGTC |
| | | | SEQ ID NO: 26 | SEQ ID NO: 27 |
| | AA | SYGMH | FIWYDGSNKYYADSVKD | RAGIIGTIGYYYGMDV |
| | | SEQ ID NO: 28 | SEQ ID NO: 29 | SEQ ID NO: 30 |
| 2H12 | NA | AGCTATGGCATGCAC | GTTATATGGTATGATGGAAGT | AGGGCCGGTATAATAGGAAC |
| | | SEQ ID NO: 31 | AATAAATACTATACAGACTCC | TACAGGCTACTACTACGGTA |
| | | | GTGAAGGGC | TGGACGTC |
| | | | SEQ ID NO: 32 | SEQ ID NO: 33 |
| | AA | SYGMH | VIWYDGSNKYYTDSVKG | RAGIIGTTGYYYGMDV |
| | | SEQ ID NO: 34 | SEQ ID NO: 35 | SEQ ID NO: 36 |
| 2H12_LC#2 | NA | AGCTATGGCATGCAC | GTTATATGGTATGATGGAAGT | AGGGCCGGTATAATAGGAAC |
| | | SEQ ID NO: 37 | AATAAATACTATACAGACTCC | TACAGGCTACTACTACGGTA |
| | | | GTGAAGGGC | TGGACGTC |
| | | | SEQ ID NO: 38 | SEQ ID NO: 39 |
| | AA | SYGMH | VIWYDGSNKYYTDSVKG | RAGIIGTTGYYYGMDV |
| | | SEQ ID NO: 40 | SEQ ID NO: 41 | SEQ ID NO: 42 |
| 4A2 | NA | AGTAGTGGTTACTACT | TACATCTATTACACTGGGAGC | GATGGAAGCAGTGGCTGGTA |
| 5B4 | | GGAGC | GCCTACTACAACCCGTCCCTC | CTTCCAGTAT |
| 5C5 | | SEQ ID NO: 43 | AAGAGT | SEQ ID NO: 45 |
| | | | SEQ ID NO: 44 | |
| | AA | SSGYYWS | YIYYTGSAYYNPSLKS | DGSSGWYFQY |
| | | SEQ ID NO: 46 | SEQ ID NO: 47 | SEQ ID NO: 48 |
| 4A9 | NA | GGTTACTACTGGAGC | TATTTCTCTTACAGTGGGAGC | AACTGGGCCTTCCACTTTGA |
| | | SEQ ID NO: 49 | ACCAACTACAACCCCTCCCTC | CTTC |
| | | | AAGAGT | SEQ ID NO: 51 |
| | | | SEQ ID NO: 50 | |
| | AA | GYYWS | YFSYSGSTNYNPSLKS | NWAFHFDF |
| | | SEQ ID NO: 52 | SEQ ID NO: 53 | SEQ ID NO: 54 |
| 4B10 | NA | AGCTATGACATGCAC | GTTATATCATATGATGGAACT | GAACGATATTTTGACTGGTC |
| 4C2 | | SEQ ID NO: 55 | AATGAATACTATGCAGACTCC | TTTTGACTAC |
| | | | GTGAAGGGC | SEQ ID NO: 57 |
| | | | SEQ ID NO: 56 | |
| | AA | SYDMH | VISYDGTNEYYADSVKG | ERYFDWSFDY |
| | | SEQ ID NO: 58 | SEQ ID NO: 59 | SEQ ID NO: 60 |
| 4D2 | NA | AGTTATGACATGCAC | GTTATATCATATGATGGAACT | GAACGATATTTTGACTGGTC |
| | | SEQ ID NO: 61 | AATGAATACTATGCAGACTCC | TTTTGACTAC |
| | | | GTGAAGGGC | SEQ ID NO: 63 |
| | | | SEQ ID NO: 62 | |
| | AA | SYDMH | VISYDGTNEYYADSVKG | ERYFDWSFDY |
| | | SEQ ID NO: 64 | SEQ ID NO: 65 | SEQ ID NO: 66 |
| 4D3 | NA | AGCTATGACATGGAC | GTTATATGGTATGATGGAAGT | GAAACTGGGGAGGgCTGGTA |
| 4F3 | | SEQ ID NO: 67 | AATAAAtacTATGCAGACTCC | CTTCGAtctc |
| | | | GTGAGGGGC | SEQ ID NO: 69 |
| | | | SEQ ID NO: 68 | |
| | AA | SYDMD | VIWYDGSNKYYADSVRG | ETGEGWYFDL |
| | | SEQ ID NO: 70 | SEQ ID NO: 71 | SEQ ID NO: 72 |
| 4E10 | NA | AGCTATGACATGCAC | GTTATATGGTATGATGGAAGT | GAGTATAGGTACAGCTGGTA |
| | | SEQ ID NO: 73 | AATAAATACTATGCAGACTCC | CTTTGACTAC |
| | | | GTGAAGGGC | SEQ ID NO: 75 |
| | | | SEQ ID NO: 74 | |
| | AA | SYDMH | VIWYDGSNKYYADSVKG | EYRYSWYFDY |
| | | SEQ ID NO: 76 | SEQ ID NO: 77 | SEQ ID NO: 78 |
| 4F7 | NA | AGTTACTCCTGGAGC | TATATCTATTACAGTGGGAGC | AACTGGGCCTTCCACTTTGA |
| | | SEQ ID NO: 79 | ACCAACTACAACCCCTCCCTC | CTAC |
| | | | AAGAGT | SEQ ID NO: 81 |
| | | | SEQ ID NO: 80 | |
| | AA | SYSWS | YIYYSGSTNYNPSLKS | NWAFHFDY |
| | | SEQ ID NO: 82 | SEQ ID NO: 83 | SEQ ID NO: 84 |
| 5E3 | NA | AGCTATAGCATGCAC | TCCATTAGTAGTAGTAGTAGT | GGGGAAACTGGAACTAACTA |
| | | SEQ ID NO: 85 | TACATATACTACGCAGACTCA | CTACTACTACGGTATGGACG |
| | | | GTGAAGGGC | TC |
| | | | SEQ ID NO: 86 | SEQ ID NO: 87 |
| | AA | SYSMH | SISSSSSYIYYADSVKG | GETGTNYYYYGMDV |
| | | SEQ ID NO: 88 | SEQ ID NO: 89 | SEQ ID NO: 90 |
| 17H8 | NA | AGTTACTACTGGAGC | TATATCTATTACATTGGGAGC | GATTCCCGGTATAGAAGTGG |
| 23B6 | | SEQ ID NO: 91 | ACCAACTACAACCCCTCCCTC | CTGGTACGATGCTTTTGATA |
| 28D10 | | | AAGAGT | TC |
| | | | SEQ ID NO: 92 | SEQ ID NO: 93 |
| | AA | SYYWS | YIYYIGSTNYNPSLKS | DSRYRSGWYDAFDI |
| | | SEQ ID NO: 94 | SEQ ID NO: 95 | SEQ ID NO: 96 |
| 16C1 | NA | GGTTACTACTGGAGC | TATATCTATTACATTGGGAGC | GATGGGAGCAGTGGCTGGTA |
| | | SEQ ID NO: 97 | ACCAACTACAACCCCTCCCTC | CCGGTGGTTCGACCCC |
| | | | AAGAGT | SEQ ID NO: 99 |
| | | | SEQ ID NO: 98 | |
| | AA | GYYWS | YIYYIGSTNYNPSLKS | DGSSGWYRWFDP |
| | | SEQ ID NO: 100 | SEQ ID NO: 101 | SEQ ID NO: 102 |
| 16A4 | NA | AGTTACTACTGGAGC | TATATCTATTACAGTGGGAGC | GATCAAAGGCGGATAGCAGC |
| | | SEQ ID NO: 103 | ACCAATTACAACCCCTCCCTC | AGCTGGTACCCACTTCTACG |
| | | | AAGAGT | GTATGGACGTC |
| | | | SEQ ID NO: 104 | SEQ ID NO: 105 |
| | AA | SYYWS | YIYYSGSTNYNPSLKS | DQRRIAAAGTHFYGMDV |
| | | SEQ ID NO: 106 | SEQ ID NO: 107 | SEQ ID NO: 108 |
| 16E2 | NA | AGCTATGGCATGCAC | GTGATATGGTATGATGGAAGT | GACGGGTGGGAGCTGTCCTT |
| 17E10 | | SEQ ID NO: 109 | AATAAATACTATGCAGACTCC | TGACTAC |
| 20B12 | | | GTGAAGGGC | SEQ ID NO: 111 |
| | | | SEQ ID NO: 110 | |
| | AA | SYGMH | VIWYDGSNKYYADSVKG | DGWELSFDY |
| | | SEQ ID NO: 112 | SEQ ID NO: 113 | SEQ ID NO: 114 |
| 22G10 | NA | AGTTATGCCATGAAC | ACTATTAGTGGTGGTGGTGCT | GGGGGAATGGGGGGATACTA |
| | | SEQ ID NO: 115 | AACACATACTACGCAGACTCC | CTACGGTATGGACGTC |
| | | | GTGAAGGGC | SEQ ID NO: 117 |
| | | | SEQ ID NO: 116 | |
| | AA | SYAMN | TISGGGANTYYADSVKG | GGMGGYYYGMDV |
| | | SEQ ID NO: 118 | SEQ ID NO: 119 | SEQ ID NO: 120 |
| 16H2 | NA | AGCTACTTTATTCAC | ATAATCAACCCTATTAGTGTT | GGGGGGATACAGCTATGGTT |
| 20D3 | | SEQ ID NO: 121 | AGCACAAGCTACGCACAGAAG | ACATTTTGACTAC |
| 23E7 | | | TTCCAGGGC | SEQ ID NO: 123 |
| | | | SEQ ID NO: 122 | |
| | AA | SYFIH | IINPISVSTSYAQKFQG | GGIQLWLHFDY |
| | | SEQ ID NO: 124 | SEQ ID NO: 125 | SEQ ID NO: 126 |
| 22D1 | NA | AGCTACTTTATTCAC | ATAATCAACCCTATTAGTGTT | GGGGGGATACAGCTATGGTT |
| | | SEQ ID NO: 127 | AGCACAAGCTACGCACAGAAG | ACATTTGGACTAC |
| | | | TTCCAGGGC | SEQ ID NO: 129 |
| | | | SEQ ID NO: 128 | |
| | AA | SYFIH | IINPISVSTSYAQKFQG | GGIQLWLHLDY |
| | | SEQ ID NO: 130 | SEQ ID NO: 131 | SEQ ID NO: 132 |
| 25F8 | NA | AGCTACTATATTCAC | ATAATCAACCCCAGTGGTGGT | GGGGGAATACAGCTATGGTT |
| | | SEQ ID NO: 133 | AGCACAAGGTACGCACAGAAG | ACATTttGACTAC |
| | | | TTCCAGGGC | SEQ ID NO: 135 |
| | | | SEQ ID NO 134 | |
| | AA | SYYIH | IINPSGGSTRYAQKFQG | GGIQLWLHFDY |
| | | SEQ ID NO: 136 | SEQ ID NO: 137 | SEQ ID NO: 138 |
| 26F12 | NA | AACTACTATATGTCC | ATAATCAACCCTAGTGGTGGT | GGGGGGATACAACTATGGTT |
| 27B3 | | SEQ ID NO: 139 | GACTCAACCTACGCACAGAAG | ACATTTTGACTAC |
| | | | TTCCAGGGC | SEQ ID NO: 141 |
| | | | SEQ ID NO: 140 | |
| | AA | NYYMS | IINPSGGDSTYAQKFQG | GGIQLWLHFDY |
| | | SEQ ID NO: 142 | SEQ ID NO: 143 | SEQ ID NO: 144 |
| 26D1 | NA | AGCTACTATATGTCC | ATAATCCACCCTAGTGGTGGT | GGGGGGATAAAACTATGGTT |
| | | SEQ ID NO: 145 | GACACAACCTACGCACAGAAG | ACATTTTGACTAT |
| | | | TTCCAGGGC | SEQ ID NO: 147 |
| | | | SEQ ID NO: 146 | |
| | AA | SYYMS | IIHPSGGDTTYAQKFQG | GGIKLWLHFDY |
| | | SEQ ID NO: 148 | SEQ ID NO: 149 | SEQ ID NO: 150 |
| 25G10 | NA | GGTTACTACTGGAGC | TATATCTATTACATTGGGAGC | GATGGGAGCAGTGGCTGGTA |
| | | SEQ ID NO: 151 | ACCAACTACAACCCCTCCCTC | CCGGTGGTTCGACCCC |
| | | | AAGAGT | SEQ ID NO: 153 |
| | | | SEQ ID NO: 152 | |
| | AA | GYYWS | YIYYIGSTNYNPSLKS | DGSSGWYRWFDP |
| | | SEQ ID NO: 154 | SEQ ID NO: 155 | SEQ ID NO: 156 |
| 23A10 | NA | CGCTATGGCATACAC | GTTATATGGTATGATGGAAGT | AGGGCCGGTATACCTGGAAC |
| | | SEQ ID NO: 157 | AATAAATACTATGCAGACTCC | TACGGGCTACTACTATGGTA |
| | | | GTGAAGGGC | TGGACGTC |
| | | | SEQ ID NO: 158 | SEQ ID NO: 159 |
| | AA | RYGIH | VIWYDGSNKYYADSVKG | RAGIPGTTGYYYGMDV |
| | | SEQ ID NO: 160 | SEQ ID NO: 161 | SEQ ID NO: 162 |
| 19B5 | NA | AGCTACTTTATTCAC | ATTATCAACCCTATTAGTGTT | GGGGGGATACAGCTATGGTT |
| | | SEQ ID NO: 163 | AGCACAAGCTACGCACAGAAG | ACATTTGGACTAC |
| | | | TTCCAGGGC | SEQ ID NO: 165 |
| | | | SEQ ID NO: 164 | |
| | AA | SYFIH | IINPISVSTSYAQKFQG | GGIQLWLHLDY |
| | | SEQ ID NO: 166 | SEQ ID NO: 167 | SEQ ID NO: 168 |

TABLE Ib
LIGHT CHAIN CDRs

| Ab | Type | CDR 1 | CDR 2 | CDR 3 |
|---|---|---|---|---|
| 1D10 | NA | TCTGGAGATAGATTGG | CAAGATACCAAGCGGCCCTCA | CAGGCGTGGGACAGCAGCAC |
| 2C12 | | GGGAAAAATATACTTG | SEQ ID NO: 170 | TGTGGTA |
| | | C | | SEQ ID NO: 171 |
| | | SEQ ID NO: 169 | | |
| | AA | SGDRLGEKYTC | QDTKRPS | QAWDSSTVV |
| | | SEQ ID NO: 172 | SEQ ID NO: 173 | SEQ ID NO: 174 |
| 1F10 | NA | AGGGCCAGTCGGAGTA | GGTCCATCCAGCAGGGCCACT | CAGCAGTATGGTAGCTCATT |
| | | TTAGCAGCAGCTACTT | SEQ ID NO: 176 | CACT |
| | | AGCC | | SEQ ID NO: 177 |
| | | SEQ ID NO: 175 | | |
| | AA | RASRSISSSYLA | GPSSRAT | QQYGSSFT |
| | | SEQ ID NO: 178 | SEQ ID NO: 179 | SEQ ID NO: 180 |
| 2C12_LC#1 | NA | AGGtCTAGTCAAAGcc | AAGGTTTCTAACTGGGactct | ATGCAAGGTATAGTGTGGCC |
| | | tcgtaTACAGTGATGG | SEQ ID NO: 182 | GTGCAGT |
| | | AAACAcctACTTGAAT | | SEQ ID NO: 183 |
| | | SEQ ID NO: 181 | | |
| | AA | RSSQSLVYSDGNTYLN | KVSNWDS | MQGIVWPCS |
| | | SEQ ID NO: 184 | SEQ ID NO: 185 | SEQ ID NO: 186 |
| 2G6_LC#1 | NA | AGGTCTAGTCAAAGCC | CAGGTTTCTAACTGGGACTCT | ATGCAAGATACACTGTGGCC |
| | | TCGTATACAGTGATGG | SEQ ID NO: 188 | GTGCAGT |
| | | AAACACCTACTTGAAT | | SEQ ID NO: 189 |
| | | SEQ ID NO: 187 | | |
| | AA | RSSQSLVYSDGNTYLN | QVSNWDS | MQDTLWPCS |
| | | SEQ ID NO: 190 | SEQ ID NO: 191 | SEQ ID NO: 192 |
| 2G6 | NA | TCTGGAGATAGGTTGG | CAAGATACCAAGCGGCCCTCA | CAGGCGTGGGACAGCAGCAC |
| | | GGGAAAAATATACTTG | SEQ ID NO: 194 | TGTGGTA |
| | | C | | SEQ ID NO: 195 |
| | | SEQ ID NO: 193 | | |
| | AA | SGDRLGEKYTC | QDTKRPS | QAWDSSTVV |
| | | SEQ ID NO: 196 | SEQ ID NO: 197 | SEQ ID NO: 198 |
| 2H12 | NA | TCTGGAGATAGATTGG | CAAGATACCAAGCGGCCCTCA | CAGGCGTGGGACAGCAGCAC |
| | | GGGAAAAATATACTTG | SEQ ID NO: 200 | TGTGGTA |
| | | C | | SEQ ID NO: 201 |
| | | SEQ ID NO: 199 | | |
| | AA | SGDRLGEKYTC | QDTKRPS | QAWDSSTVV |
| | | SEQ ID NO: 202 | SEQ ID NO: 203 | SEQ ID NO: 204 |
| 2H12_LC#2 | NA | AGGTCTAGTCAAAGCC | AAGGTTTCTAACTGGGACTCT | ATGCAAGATACACTGTGGCC |
| | | TCGTATACAGTGATGG | SEQ ID NO: 206 | GTGCAGT |
| | | AAACACCTACTTGAAT | | SEQ ID NO: 207 |
| | | SEQ ID NO: 205 | | |
| | AA | RSSQSLVYSDGNTYLN | KVSNWDS | MQDTLWPCS |
| | | SEQ ID NO: 208 | SEQ ID NO: 209 | SEQ ID NO: 210 |
| 4A2 | NA | AGGgcCAGTCGGAATA | GGTCCATCCAGCAGGGccaCT | CAGCAGTATGGtagctCATT |
| 5B4 | | TTAGCAGCAGCTACtt | SEQ ID NO: 212 | CACT |
| 5C5 | | aGCC | | SEQ ID NO: 213 |
| | | SEQ ID NO: 211 | | |
| | AA | RASRNISSSYLA | GPSSRAT | QQYGSSFT |
| | | SEQ ID NO: 214 | SEQ ID NO: 215 | SEQ ID NO: 216 |
| 4A9 | NA | ACTGGGAGCAGCTCCA | GGTAACAACAATCGGCCCTCA | CAGTCCTATGACAGCagACT |
| | | ACATCGGGACAGGTTA | SEQ ID NO: 218 | GAGTGGTTGGGTG |
| | | TGCTGTACAC | | SEQ ID NO: 219 |
| | | SEQ ID NO: 217 | | |
| | AA | TGSSSNIGTGYAVH | GNNNRPS | QSYDSRLSGWV |
| | | SEQ ID NO: 220 | SEQ ID NO: 221 | SEQ ID NO: 222 |
| 4B10 | NA | AGGGCCAGTCAGAGTG | GGTGCATCCAGCAGGGCCACT | CAGCAGTACAGTAACTCgtg |
| 4C2 | | TTAGCAACACCTACTT | SEQ ID NO: 224 | GACG |
| | | AGCC | | SEQ ID NO: 225 |
| | | SEQ ID NO: 223 | | |
| | AA | RASQSVSNTYLA | GASSRAT | QQYSNSWT |
| | | SEQ ID NO: 226 | SEQ ID NO: 227 | SEQ ID NO: 228 |
| 4D2 | NA | AGGGCCAGTCAGAGTG | GGTGCATCCAGCAGGGCCGCT | CagcagTATAGTAacTcgtg |
| | | TTAGCAACACCTACTT | SEQ ID NO: 230 | GACG |
| | | AGCC | | SEQ ID NO: 231 |
| | | SEQ ID NO: 229 | | |
| | AA | RASQSVSNTYLA | GASSRAA | QQYSNSWT |
| | | SEQ ID NO: 232 | SEQ ID NO: 233 | SEQ ID NO: 234 |
| 4D3 | NA | AGGGCCAGTCAGAGTG | GGTGCATCCAGCAGGGCCACT | CAGCAGTATGGTAGCTCGTG |
| 4F3 | | TTAGCAGCAGCTACTT | SEQ ID NO: 236 | GACG |
| | | AGCC | | SEQ ID NO: 237 |
| | | SEQ ID NO: 235 | | |
| | AA | RASQSVSSSYLA | GASSRAT | QQYGSSWT |
| | | SEQ ID NO: 238 | SEQ ID NO: 239 | SEQ ID NO: 240 |
| 4E10 | NA | AGGGCCAGTCAGAGTG | GGTGCATCCAGCAGGGTCACT | CAGCAATATAGTAACTCGTG |
| | | TTGGCAGCAGCTACTT | SEQ ID NO: 242 | GACG |
| | | AGCC | | SEQ ID NO: 243 |
| | | SEQ ID NO: 241 | | |
| | AA | RASQSVGSSYLA | GASSRVT | QQYSNSWT |
| | | SEQ ID NO: 244 | SEQ ID NO: 245 | SEQ ID NO: 246 |
| 4F7 | NA | ACTGGGAGCAGCTCCA | GGTAACAGCAATCGGCCCTCA | CAGTCCTATGACAGCAGTCT |
| | | ATATCGGGACAGGTTA | SEQ ID NO: 248 | GAGTGGTTGGGTG |
| | | TGATGTACAC | | SEQ ID NO: 249 |
| | | SEQ ID NO: 247 | | |
| | AA | TGSSSNIGTGYDVH | GNSNRPS | QSYDSSLSGWV |
| | | SEQ ID NO: 250 | SEQ ID NO: 251 | SEQ ID NO: 252 |
| 5E3 | NA | TCTGGAGATAAATTGG | CAAGATAGCAAGCGGCCCTCA | CAGGCGTGGGACAGCAGCAC |
| | | GGGATGAATATGCTTG | SEQ ID NO: 254 | TGTGGTA |
| | | C | | SEQ ID NO: 255 |
| | | SEQ ID NO: 253 | | |
| | AA | SGDKLGDEYAC | QDSKRPS | QAWDSSTVV |
| | | SEQ ID NO: 256 | SEQ ID NO: 257 | SEQ ID NO: 258 |
| 17H8 | NA | AGGGCCAGTCAGAGTG | GGTGCATCCAGCAGGGCCACT | CAGCAGTATGGTAAATCACC |
| 23B6 | | TTGCCGGCAGCTACCT | SEQ ID NO: 260 | GATCACC |
| 28D10 | | AGCC | | SEQ ID NO: 261 |
| | | SEQ ID NO: 259 | | |
| | AA | RASQSVAGSYLA | GASSRAT | QQYGKSPIT |
| | | SEQ ID NO: 262 | SEQ ID NO: 263 | SEQ ID NO: 264 |
| 16C1 | NA | AGGGCCAGCCAGAGTG | GGTGCATCCAGCAGGGCCACT | CAGCAGTATGGTAACTCACC |
| | | TTAGCAGCAGCTACTT | SEQ ID NO: 266 | GCTCACT |
| | | AGCC | | SEQ ID NO: 267 |
| | | SEQ ID NO: 265 | | |
| | AA | RASQSVSSSYLA | GASSRAT | QQYGNSPLT |
| | | SEQ ID NO: 268 | SEQ ID NO: 269 | SEQ ID NO: 270 |
| 16A4 | NA | AGGGCCAGTCAGAGTG | GGTACATCCAGCAGGGCCACT | CAGCAGTACGGTAGCTCACC |
| | | TTAGCAGCAGTTATTT | SEQ ID NO: 272 | TTTCACT |
| | | AGCC | | SEQ ID NO: 273 |
| | | SEQ ID NO: 271 | | |
| | AA | RASQSVSSSYLA | GTSSRAT | QQYGSSPFT |
| | | SEQ ID NO: 274 | SEQ ID NO: 275 | SEQ ID NO: ***276 |
| 16E2 | NA | CGGGCGAGTCAGGGCA | GCTGCATCCAGTTTGCAAAGT | CAACACTATTTTACTTACCC |
| 17E10 | | TTAGCAATTATTTAGC | SEQ ID NO: 278 | TCGGACG |
| 20B12 | | C | | SEQ ID NO: 279 |
| | | SEQ ID NO: 277 | | |
| | AA | RASQGISNYLA | AASSLQS | QHYFTYPRT |
| | | SEQ ID NO: 280 | SEQ ID NO: 281 | SEQ ID NO: 282 |
| 22G10 | NA | AGGGCCAGTCAGAGTA | GGTGCATTTACCAGGGCCACT | CAGCAGTATAATTACTGGCC |
| | | TTAGCAGCAACTTAGC | SEQ ID NO: 284 | GCTCACT |
| | | C | | SEQ ID NO: 285 |
| | | SEQ ID NO: 283 | | |
| | AA | RASQSISSNLA | GAFTRAT | QQYNYWPLT |
| | | SEQ ID NO: 286 | SEQ ID NO: 287 | SEQ ID NO: 288 |
| 16H2 | NA | TCTGGAAGCAGCTCCA | ACTAATAATCAGCGGCCCTCA | GCAACATGGGATGACAGCCT |
| 20D3 | | ACATCGGAAGTAATTT | SEQ ID NO: 290 | GAATGGTTGGGTG |
| 23E7 | | TGTAAAC | | SEQ ID NO: 291 |
| | | SEQ ID NO: 289 | | |
| | AA | SGSSSNIGSNFVN | TNNQRPS | ATWDDSLNGWV |
| | | SEQ ID NO: 292 | SEQ ID NO: 293 | SEQ ID NO: 294 |
| 22D1 | NA | TCTGGAAGCAGCTCCA | ACTAATAATCAGCGGCCCTCA | GCAACATGGGATGACAGTAT |
| | | ACATCGGAAGCAATTT | SEQ ID NO: 296 | GAATGGTTGGGTG |
| | | TGTAAAC | | SEQ ID NO: 297 |
| | | SEQ ID NO: 295 | | |
| | AA | SGSSSNIGSNEVN | TNNQRPS | ATWDDSMNGWV |
| | | SEQ ID NO: 298 | SEQ ID NO: 299 | SEQ ID NO: 300 |
| 25F8 | NA | TCTGGAAGCAGCTCCA | ACTAATAATCAGCGGCCCTCA | GCAGCATGGGATGACAGCCT |
| | | ACATCGGAAGGAATTT | SEQ ID NO: 302 | GAATGGTTGGGTG |
| | | TGTAAAC | | SEQ ID NO: 303 |
| | | SEQ ID NO: 301 | | |
| | AA | SGSSSNIGRNEVN | TNNQRPS | AAWDDSLNGWV |
| | | SEQ ID NO: 304 | SEQ ID NO: 305 | SEQ ID NO: 306 |
| 26F12 | NA | TCTGGAAGCCGCTCCA | ACTAATTATCAGCGGCCCTCA | GCAGTATGGGATGACAGCCT |
| 27B3 | | ACATCGGAAGTAATTT | SEQ ID NO: 308 | GAATGGTTGGGTG |
| | | TGTAAAC | | SEQ ID NO: 309 |
| | | SEQ ID NO: 307 | | |
| | AA | SGSRSNIGSNEVN | TNYQRPS | AVWDDSLNGWV |
| | | SEQ ID NO: 310 | SEQ ID NO: 311 | SEQ ID NO: 312 |
| 26D1 | NA | TCTGGAAGCCGCTCCA | ACTAATAATCAGCGGCCCTCA | GCAGTATGGGATGACAGCCT |
| | | ACATCGGAAGTAATTT | SEQ ID NO: 314 | GAATGGTTGGGTG |
| | | TGTAAAC | | SEQ ID NO: 315 |
| | | SEQ ID NO: 313 | | |
| | AA | SGSRSNIGSNEVN | TNNQRPS | AVWDDSLNGWV |
| | | SEQ ID NO: 316 | SEQ ID NO: 317 | SEQ ID NO: 318 |
| 25G10 | NA | AGGGCCAGTCAGAGTG | GGTGCATCCAGCAGGGCCACT | CAGCAGTATGGTAACTCACC |
| | | TTAGCAGCAGCTACTT | SEQ ID NO: 320 | GCTCACT |
| | | AGCC | | SEQ ID NO: 321 |
| | | SEQ ID NO: 319 | | |
| | AA | RASQSVSSSYLA | GASSRAT | QQYGNSPLT |
| | | SEQ ID NO: 322 | SEQ ID NO: 323 | SEQ ID NO: 324 |
| 23A10 | NA | TCTGGAGATAGATTGG | CAAGATAATAAGTGGCCCTCA | CAGGCGTGGGACAGCAGcac |
| | | GGGAGAAATATGTTTG | SEQ ID NO: 326 | TGTGGTA |
| | | C | | SEQ ID NO: 327 |
| | | SEQ ID NO: 325 | | |
| | AA | SGDRLGEKYVC | QDNKWPS | QAWDSSTVV |
| | | SEQ ID NO: 328 | SEQ ID NO: 329 | SEQ ID NO: 330 |
| 19B5 | NA | TCTGGAAGCAGGTCCA | ACTAATAATCAGCGGCCCTCA | GCAACATGGGATGACAGTAT |
| | | ACATCGGAAGCAATTT | SEQ ID NO: 332 | GAATGGTTGGGTG |
| | | TGTAAAC | | SEQ ID NO: 333 |
| | | SEQ ID NO: 331 | | |
| | AA | SGSRSNIGSNEVN | TNNQRPS | ATWDDSMNGWV |
| | | SEQ ID NO: 334 | SEQ ID NO: 335 | SEQ ID NO: 336 |

[0492] Anti-CDH19 Variable Region Amino Acid Sequences and Polynucleotide Sequences

TABLE IIa
Heavy Chain Variable Region Polynucleotide and Amino acid Sequences

| SEQ | | | | |
|---|---|---|---|---|
| ID | | | | |
| NO. | DESIGNATION | SOURCE | TYPE | SEQUENCE |
| 337 | 17H8 | artificial | nt | CAGGTGCAGCTGCAGGAGTCGGGCCCAGGACTGGTGAAGCCTT |
| | 23B6 | | | CGGAGACCCTGTCCCTCACGTGCACTGTCTCTGGTGGCTCCAT |
| | 28D10 | | | CAATAGTTACTACTGGAGCTGGATCCGGCAGCCCCCAGGGAAG |
| | | | | GGACTGGAGTGGATTGGGTATATCTATTACATTGGGAGCACCA |
| | | | | ACTACAACCCCTCCCTCAAGAGTCGCGTCACCATATCAGTAGA |
| | | | | CACGTCCAAGAACCAGTTCTCCCTGAAGCTGAGCTCTGTGACC |
| | | | | GCTGCGGACACGGCCCTGTATTACTGTGCGAGAGATTCCCGGT |
| | | | | ATAGAAGTGGCTGGTACGATGCTTTTGATATCTGGGGCCAAGG |
| | | | | GACAATGGTCACCGTCTCTTCA |
| 338 | 17H8 | artificial | aa | QVQLQESGPGLVKPSETLSLTCTVSGGSINSYYWSWIRQPPGK |
| | 23B6 | | | GLEWIGYIYYIGSTNYNPSLKSRVTISVDTSKNQFSLKLSSVT |
| | 28D10 | | | AADTALYYCARDSRYRSGWYDAFDIWGQGTMVTVSS |
| 339 | 4A2 | artificial | nt | CAGGTGCAGCTGCAGGAGTCGGGCCCAGGACTGGTGAAGCCTT |
| | 5B4 | | | CACAGACCCTGTCCCTCACCTGCACTGTCTCTGGTGGCTCCAT |
| | 5C5 | | | CAGCAGTAGTGGTTACTACTGGAGCTGGATCCGCCAGCACCCA |
| | | | | GGGAAGGGCCTGGAGTGGATTGGGTACATCTATTACACTGGGA |
| | | | | GCGCCTACTACAACCCGTCCCTCAAGAGTCGAGTTACCATATC |
| | | | | AGTAGACACGTCTAAGAACCAGTTCTCCCTGAAGCTGAGCTCT |
| | | | | GTGACTGCCGCGGACACGGCCGTGTATTACTGTGCGAGAGATG |
| | | | | GAAGCAGTGGCTGGTACTTCCAGTATTGGGGCCAGGGCACCCT |
| | | | | GGTCACCGTCTCCTCA |
| 340 | 4A2 | artificial | aa | QVQLQESGPGLVKPSQTLSLTCTVSGGSISSSGYYWSWIRQHP |
| | 5B4 | | | GKGLEWIGYIYYTGSAYYNPSLKSRVTISVDTSKNQFSLKLSS |
| | 5C5 | | | VTAADTAVYYCARDGSSGWYFQYWGQGTLVTVSS |
| 341 | 16H2 | artificial | nt | CAGGTGCAGCTGGTGCAGTCTGGGGCTGAGGTGAAGAAGCCTG |
| | 20D3 | | | GGGCCTCAGTGAAGGTTTCCTGCAAGGTTTCTGGATACACCTT |
| | 23E7 | | | CACCAGCTACTTTATTCACTGGGTGCGCCAGGCCCCTGGACAA |
| | | | | GGGCTTGAGTGGATGGGAATAATCAACCCTATTAGTGTTAGCA |
| | | | | CAAGCTACGCACAGAAGTTCCAGGGCAGAGTCACCATGACCAG |
| | | | | GGACACGTCCACGAGCACAGTCTTCATGGAGCTGAGCAGCCTG |
| | | | | AGATCTGAGGACACGGCCGTGTATTACTGTGCGCGAGGGGGGA |
| | | | | TACAGCTATGGTTACATTTTGACTACTGGGGCCAGGGAACCCT |
| | | | | GGTCACCGTCTCCTCA |
| 342 | 16H2 | artificial | aa | QVQLVQSGAEVKKPGASVKVSCKVSGYTFTSYFIHWVRQAPGQ |
| | 20D3 | | | GLEWMGIINPISVSTSYAQKFQGRVTMTRDTSTSTVFMELSSL |
| | 23E7 | | | RSEDTAVYYCARGGIQLWLHFDYWGQGTLVTVSS |
| 343 | 26F12 | artificial | nt | CAGGTGCAGTTGGTGCAGTCTGGGGCTGAGGTGAAGAAGCCTG |
| | 27B3 | | | GGGCCTCAGTGAAGGTTTCCTGCAAGGCATCTAGATACACCTT |
| | | | | CACCAACTACTATATGTCCTGGGTGCGACAGGCCCCTGGACAA |
| | | | | GGGCTTGAGTGGATGGGAATAATCAACCCTAGTGGTGGTGACT |
| | | | | CAACCTACGCACAGAAGTTCCAGGGCAGACTCACCATGACCGG |
| | | | | GGACACGTCCACGAGCACAGTCTACATGGAGCTGAGCAGCCTG |
| | | | | AGATCTGAGGACACGGCCGTGTATTACTGTGCGAGAGGGGGGA |
| | | | | TACAACTATGGTTACATTTTGACTACTGGGGCCAGGGAACCCT |
| | | | | GGTCACCGTCTCCTCA |
| 344 | 26F12 | artificial | aa | QVQLVQSGAEVKKPGASVKVSCKASRYTFTNYYMSWVRQAPGQ |
| | 27B3 | | | GLEWMGIINPSGGDSTYAQKFQGRLTMTGDTSTSTVYMELSSL |
| | | | | RSEDTAVYYCARGGIQLWLHFDYWGQGTLVTVSS |
| 345 | 4B10 | artificial | nt | CAGGTGCAGTTGGTGGAGTCTGGGGGAGGCGTGGTCCAGCCTG |
| | 4C2 | | | GGAGGTCCCTGAGACTCTCCTGTGCAGCCTCTGGATTCACCTT |
| | | | | CAGTAGCTATGACATGCACTGGGTCCGCCAGGCTCCAGGCAAG |
| | | | | GGGCTGGAGTGGGTGGCAGTTATATCATATGATGGAACTAATG |
| | | | | AATACTATGCAGACTCCGTGAAGGGCCGATTCACCATCTCCAG |
| | | | | AGACACTTCCAAGAACACGCTGTATTTGCAAATGAACAGCCTG |
| | | | | AGAGCTGAGGACACGGCTGTATATTACTGTGCGAGAGAACGAT |
| | | | | ATTTTGACTGGTCTTTTGACTACTGGGGCCAGGGAACCCTGGT |
| | | | | CAGTGTCTCCTCA |
| 346 | 4B10 | artificial | aa | QVQLVESGGGVVQPGRSLRLSCAASGFTFSSYDMHWVRQAPGK |
| | 4C2 | | | GLEWVAVISYDGTNEYYADSVKGRFTISRDTSKNTLYLQMNSL |
| | | | | RAEDTAVYYCARERYFDWSFDYWGQGTLVSVSS |
| 347 | 4D3 | artificial | nt | CAGGTGCAGCTGGTGGAGTCTGGGGGAGGCGTGGTCCAGCCTG |
| | 4F3 | | | GGAGGTCCCTGAGACTCTCCTGTGCAGCGTCTGGATTCTCCTT |
| | | | | CAGTAGCTATGACATGGACTGGGTCCGCCAGACTCCAGGCAAG |
| | | | | GGGCTGGAGTGGGTGGCAGTTATATGGTATGATGGAAGTAATA |
| | | | | AATACTATGCAGACTCCGTGAGGGGCCGATTCACCATCTCCAG |
| | | | | AGACAATTCCAAGAACACGCTGTTTCTGCAAATGAACAGCCTG |
| | | | | AGAGTCGAGGACACGGCTGTGTATTACTGTGCGAGAGAAACTG |
| | | | | GGGAGGGCTGGTACTTCGATCTCTGGGGCCGTGGCACCCTGGT |
| | | | | CACTGTCTCCTCA |
| 348 | 4D3 | artificial | aa | QVQLVESGGGVVQPGRSLRLSCAASGFSFSSYDMDWVRQTPGK |
| | 4F3 | | | GLEWVAVIWYDGSNKYYADSVRGRFTISRDNSKNTLFLQMNSL |
| | | | | RVEDTAVYYCARETGEGWYFDLWGRGTLVTVSS |
| 349 | 16E2 | artificial | nt | CAGGTGCAGCTGGTGGAGTCTGGGGGAGGCGTGGTCCAGCCTG |
| | 17E10 | | | GGAGGTCCCTGAGACTCTCCTGTGCAGCGTCTGGATTCATCTT |
| | 20B12 | | | CAGTAGCTATGGCATGCACTGGGTCCGCCAGACTCCAGGCAAG |
| | | | | GGGCTGGAGTGGGTGGCAGTGATATGGTATGATGGAAGTAATA |
| | | | | AATACTATGCAGACTCCGTGAAGGGCCGATTCACCATCTCCAG |
| | | | | AGACATTTCCAAGAACACGCTGTATCTGCAAATGAACAGCCTG |
| | | | | AGAGTCGAGGACACGGCTGTGTATTACTGTGCGAGAGACGGGT |
| | | | | GGGAGCTGTCCTTTGACTACTGGGGCCAGGGAACCCTGGTCAC |
| | | | | CGTCTCCTCA |
| 350 | 16E2 | artificial | aa | QVQLVESGGGVVQPGRSLRLSCAASGFIFSSYGMHWVRQTPGK |
| | 17E10 | | | GLEWVAVIWYDGSNKYYADSVKGRFTISRDISKNTLYLQMNSL |
| | 20B12 | | | RVEDTAVYYCARDGWELSFDYWGQGTLVTVSS |
| 351 | 1D10 | artificial | nt | CAGGTGCAGCTGGTGGAGTCTGGGGGAGGCGTGGTCCAGCCTG |
| | 2C12 | | | GGAGGTCCCTGAGACTCTCCTGTGCAGCGTCTGGATTCACCTT |
| | | | | CAGTAGCTATGGCATGCACTGGGTCCGCCAGGCTCCAGGCAAG |
| | | | | GGGCTGGAGTGGGTGTCAGTTATATGGTATGATGGAAGTAATA |
| | | | | AATACTATGCAGACTCCGTGAAGGGCCGATTCACCATCTCCAG |
| | | | | AGACAATTCCAAGAACACGCTGTATCTGCAAATGAATAGCCTG |
| | | | | AGAGCTGAGGACACGGCTGTGTATTACTGCGCGAGAAGGGCCG |
| | | | | GTATAATAGGAACTACAGGCTACTACTACGGTATGGACGTCTG |
| | | | | GGGCCAAGGGACCACGGTCACCGTCTCCTCA |
| 352 | 1D10 | artificial | aa | QVQLVESGGGVVQPGRSLRLSCAASGFTFSSYGMHWVRQAPGK |
| | 2C12 | | | GLEWVSVIWYDGSNKYYADSVKGRFTISRDNSKNTLYLQMNSL |
| | | | | RAEDTAVYYCARRAGIIGTTGYYYGMDVWGQGTTVTVSS |
| 353 | 16C1 | artificial | nt | CAGGTGCAGCTGCAGGAGTCGGGCCCAGGACTGGTGAAGCCTT |
| | | | | CGGAGACCCTGTCCCTCACTTGTACTGTCTCTGGTGGCTCCAT |
| | | | | CAGTGGTTACTACTGGAGCTGGATCCGGCAGCCCCCAGGGAAG |
| | | | | GGACTGGAGTGGATTGGGTATATCTATTACATTGGGAGCACCA |
| | | | | ACTACAACCCCTCCCTCAAGAGTCGAGTCACCATGTCAATAGA |
| | | | | CACGTCCAAGAACCAGTTCTCCCTGACGCTGAGCTCTTTGACC |
| | | | | GCTGCGGACACGGCCGTGTATTTCTGTGCGAGAGATGGGAGCA |
| | | | | GTGGCTGGTACCGGTGGTTCGACCCCTGGGGCCAGGGAACCCT |
| | | | | GGTCACCGTCTCCTCA |
| 354 | 16C1 | artificial | aa | QVQLQESGPGLVKPSETLSLTCTVSGGSISGYYWSWIRQPPGK |
| | | | | GLEWIGYIYYIGSTNYNPSLKSRVTMSIDTSKNQFSLTLSSLT |
| | | | | AADTAVYFCARDGSSGWYRWFDPWGQGTLVTVSS |
| 355 | 25G10 | artificial | nt | CAGGTGCAGCTGCAGGAGTCGGGCCCAGGACTGGTGAAGCCTT |
| | | | | CGGAGACCCTGTCCCTCACCTGCACTGTCTCTGGTGGCTCCAT |
| | | | | CAGTGGTTACTACTGGAGCTGGATCCGGCAGCCCCCAGGGAAG |
| | | | | GGACTGGAGTGGATTGGGTATATCTATTACATTGGGAGCACCA |
| | | | | ACTACAACCCCTCCCTCAAGAGTCGAGTCACCATGTCAGTAGA |
| | | | | CACGTCCAAGAACCAGTTCTCCCTGAAGCTGAGCTCTGTGACC |
| | | | | GCTGCGGACACGGCCGTGTATTACTGTGCGAGAGATGGGAGCA |
| | | | | GTGGCTGGTACCGGTGGTTCGACCCCTGGGGCCAGGGAACCCT |
| | | | | GGTCACCGTCTCCTCA |
| 356 | 25G10 | artificial | aa | QVQLQESGPGLVKPSETLSLTCTVSGGSISGYYWSWIRQPPGK |
| | | | | GLEWIGYIYYIGSTNYNPSLKSRVTMSVDTSKNQFSLKLSSVT |
| | | | | AADTAVYYCARDGSSGWYRWFDPWGQGTLVTVSS |
| 357 | 16A4 | artificial | nt | CAGGTGCAGCTGCAGGAGTCgGGCCCAGGACTGGCGAAgcctt |
| | | | | cGGAGACcctgtccctcacctgCACTGTCTCTGGTGACTCCAT |
| | | | | CACTAGTTACTACTGGAGCTGGATCCGGCAGCCCCCAGGGAAG |
| | | | | GGACTGGAGTGGATTGGGTATATCTATTACAGTGGGAGCACCA |
| | | | | ATTACAACCCCTCCCTCAAGAGTCGAGTCACCATATCAGTAGA |
| | | | | CACGTCCAAGAACCAGTTCTCCCTGAAGCTGAGTTCTGTGACC |
| | | | | GCTGCGGACACGGCCGTGTATTACTGTGCGAGAGATCAAAGGC |
| | | | | GGATAGCAGCAGCTGGTACCCACTTCTACGGTATGGACGTCTG |
| | | | | GGGCCAAGGGACCACGGTCACCGTCTCCTCA |
| 358 | 16A4 | artificial | aa | QVQLQESGPGLAKPSETLSLTCTVSGDSITSYYWSWIRQPPGK |
| | | | | GLEWIGYIYYSGSTNYNPSLKSRVTISVDTSKNQFSLKLSSVT |
| | | | | AADTAVYYCARDQRRIAAAGTHFYGMDVWGQGTTVTVSS |
| 359 | 1F10 | artificial | nt | CAGGTGCAGCTGCAGGAGTCGGGCCCAGGACTGGTGAAGCCTT |
| | | | | CACAGACCCTGTCCCTCACCTGCACTGTCTCTGGTGGCTCCAT |
| | | | | CAGCAGTGGTGGTTACTACTGGAGCTGGATCCGCCAGCACCCA |
| | | | | GGGAAGGGCCTGGAGTGGATTGGGTACATCTATTACAGTGGGA |
| | | | | GCACCTACTACAACCCGTCCCTCACGAGTCGAGTTACCATATC |
| | | | | AGTAGACACGTCTAAGAACCAGTTCTCCCTGAAGCTGAGCTCT |
| | | | | GTGACTGCCGCGGACACGGCCGTGTATTACTGTGCGAGAGATG |
| | | | | GAAGCAGTGGCTGGTACTTCCAGCACTGGGGCCAGGGCACCCT |
| | | | | GGTCACCGTCTCCTCA |
| 360 | 1F10 | artificial | aa | QVQLQESGPGLVKPSQTLSLTCTVSGGSISSGGYYWSWIRQHP |
| | | | | GKGLEWIGYIYYSGSTYYNPSLTSRVTISVDTSKNQFSLKLSS |
| | | | | VTAADTAVYYCARDGSSGWYFQHWGQGTLVTVSS |
| 361 | 4A9 | artificial | nt | CAGGTGCAGCTGCAGGAGTCGGGCCCAGGACTGGTGAAGCCTT |
| | | | | CGGAGACCCTGTCCCTCACCTGCACTGTCTCTGGTGGCTCCAT |
| | | | | CAGTGGTTACTACTGGAGCTGGATCCGGCAGCCCCCAGGAAAG |
| | | | | GGACTGGAGTGGTTTGCATATTTCTCTTACAGTGGGAGCACCA |
| | | | | ACTACAACCCCTCCCTCAAGAGTCGAGTCACCTTATCAGTAGA |
| | | | | CACGTCCAAGAACCAGTTCTCCCTGAAGCTGAGCTCTGTGACC |
| | | | | GCTGCGGACACGGCCGTGTATTACTGTGCGAGGAACTGGGCCT |
| | | | | TCCACTTTGACTTCTGGGGCCAGGGAACCCTGGTCACCGTCTC |
| | | | | CTCA |
| 362 | 4A9 | artificial | aa | QVQLQESGPGLVKPSETLSLTCTVSGGSISGYYWSWIRQPPGK |
| | | | | GLEWFAYFSYSGSTNYNPSLKSRVTLSVDTSKNQFSLKLSSVT |
| | | | | AADTAVYYCARNWAFHFDFWGQGTLVTVSS |
| 363 | 4F7 | artificial | nt | CAGGTGCAGCTGCAGGAGTCGGGCCCAGGACTGGTGAAGCCTT |
| | | | | CGGAGACCCTGTCCCTCACCTGCACTGTCTCTGGTGGCTCCAT |
| | | | | CAGTAGTTACTCCTGGAGCTGGATCCGGCAGCCCCCAGGGAAG |
| | | | | GGACTGGAGTGGATTGGGTATATCTATTACAGTGGGAGCACCA |
| | | | | ACTACAACCCCTCCCTCAAGAGTCGAGTCACCATATCATTAGA |
| | | | | CACGTCCAAGAACCAGTTCTCCCTGAAGCTGAGCTCTGTGACC |
| | | | | GCTGCGGACACGGCCGTGTATTACTGTGCGAGGAACTGGGCCT |
| | | | | TCCACTTTGACTACTGGGGCCAGGGAACCCTGGTCACCGTCTC |
| | | | | CTCA |
| 364 | 4F7 | artificial | aa | QVQLQESGPGLVKPSETLSLTCTVSGGSISSYSWSWIRQPPGK |
| | | | | GLEWIGYIYYSGSTNYNPSLKSRVTISLDTSKNQFSLKLSSVT |
| | | | | AADTAVYYCARNWAFHFDYWGQGTLVTVSS |
| 365 | 22D1 | artificial | nt | CAGGTGCAGCTGGTGCAGTCTGGGGCTGAGGTGAAGAAGCCTG |
| | | | | GGGCCTCAGTGAGGGTTTCCTGCAAGGTTTCTGGATACACCTT |
| | | | | CACCAGCTACTTTATTCACTGGGTACGCCAGGCCCCTGGACAA |
| | | | | GGGCTTGAGTGGATGGGAATAATCAACCCTATTAGTGTTAGCA |
| | | | | CAAGCTACGCACAGAAGTTCCAGGGCAGAGTCACCATGACCAG |
| | | | | GGACACGTCCACGAGCACAGTCTTCATGGAGCTGAGCAGCCTG |
| | | | | AGATCTGAGGACACGGCCGTGTATTACTGTGCGCGAGGGGGGA |
| | | | | TACAGCTATGGTTACATTTGGACTACTGGGGCCAGGGAACCCT |
| | | | | GGTCACCGTCTCCTCA |
| 366 | 22D1 | artificial | aa | QVQLVQSGAEVKKPGASVRVSCKVSGYTFTSYFIHWVRQAPGQ |
| | | | | GLEWMGIINPISVSTSYAQKFQGRVTMTRDTSTSTVFMELSSL |
| | | | | RSEDTAVYYCARGGIQLWLHLDYWGQGTLVTVSS |
| 367 | 19B5 | artificial | nt | CAGGTGCAGTTGGTGCAGTCTGGGGCTGAGGTGAAGAAGCCTG |
| | | | | GGGCCTCAGTGAAGGTTTCCTGCAAGGTTTCTGGATACACCTT |
| | | | | CACCAGCTACTTTATTCACTGGGTGCGCCAGGCCCCTGGACAA |
| | | | | GGGCTTGAATGGATGGGAATTATCAACCCTATTAGTGTTAGCA |
| | | | | CAAGCTACGCACAGAAGTTCCAGGGCAGAGTCACCATGACCAG |
| | | | | GGACACGTCCACGAGCACAGTCTTCATGGAGCTGAGCAGcCTG |
| | | | | AGATCTGAGGACACGGCCGTGTATTACTGTGCGCGAGGGGGGA |
| | | | | TACAGCTATGGTTACATTTGGACTACTGGGGCCAGGGAACCCT |
| | | | | GGTCACCGTCTCCTCA |
| 368 | 19B5 | artificial | aa | QVQLVQSGAEVKKPGASVKVSCKVSGYTFTSYFIHWVRQAPGQ |
| | | | | GLEWMGIINPISVSTSYAQKFQGRVTMTRDTSTSTVFMELSSL |
| | | | | RSEDTAVYYCARGGIQLWLHLDYWGQGTLVTVSS |
| 369 | 25F8 | artificial | nt | CAGGTGCAGCTGGTGCAGTCTGGGGCTGAGGTGAAGAAGCCTG |
| | | | | GGGCCTCAGTGAAGGTTTCCTGCAAGGCATCTGGATACACCTT |
| | | | | CACCAGCTACTATATTCACTGGGTGCGCCAGGCCCCTGGACAA |
| | | | | GGACTTGAGTGGATGGGAATAATCAACCCCAGTGGTGGTAGCA |
| | | | | CAAGGTACGCACAGAAGTTCCAGGGCAGAGTCACCATGACCAG |
| | | | | GGACACGTCCACGAGCACAGTCTTCATGGAGCTGAGCagcctG |
| | | | | AGATCTGAGGACACGGCCGTGTATTACTGTGCGCGAGGGGGAA |
| | | | | TACAGCTATGGTTACATTttGACTACTGGGGCCAGGGAACCCT |
| | | | | GGTCACCGTCTCCTCA |
| 370 | 25F8 | artificial | aa | QVQLVQSGAEVKKPGASVKVSCKASGYTFTSYYIHWVRQAPGQ |
| | | | | GLEWMGIINPSGGSTRYAQKFQGRVTMTRDTSTSTVFMELSSL |
| | | | | RSEDTAVYYCARGGIQLWLHFDYWGQGTLVTVSS |
| 371 | 26D1 | artificial | nt | CAGGTGCAGTTGGTGCAGTCTGGGGCTGAGGTGAAGAAGCCTG |
| | | | | GGGCCTCAGTGAAGGTTTCCTGTAAGGCATCTAGATACACCTT |
| | | | | CACCAGCTACTATATGTCCTGGGTGCGACAGGCCCCTGGACAA |
| | | | | GGGCTTGAGTGGATGGGAATAATCCACCCTAGTGGTGGTGACA |
| | | | | CAACCTACGCACAGAAGTTCCAGGGCAGAGTCACCATGACCGG |
| | | | | GGACACGTCCACGAGCACAGTCTACATGGAGCTGAGCAGCCTG |
| | | | | AGATCTGAGGACACGGCCGTGTATTACTGTGCGAGAGGGGGGA |
| | | | | TAAAACTATGGTTACATTTTGACTATTGGGGCCAGGGAACCCT |
| | | | | GGTCACCGTCTCCTCA |
| 372 | 26D1 | artificial | aa | QVQLVQSGAEVKKPGASVKVSCKASRYTFTSYYMSWVRQAPGQ |
| | | | | GLEWMGIIHPSGGDTTYAQKFQGRVTMTGDTSTSTVYMELSSL |
| | | | | RSEDTAVYYCARGGIKLWLHFDYWGQGTLVTVSS |
| 373 | 4D2 | artificial | nt | CAGGTGCAGCTGGTGGAGTCTGGGGGAGGCGTGGTCCAGCCTG |
| | | | | GGAGGTCCCTGAGACTCTCCTGTGCAGCCTCTGGATTCACCTT |
| | | | | CAGTAGTTATGACATGCACTGGGTCCGCCAGGCTCCAGGCAAG |
| | | | | GGGCTGGAGTGGGTGGCAGTTATATCATATGATGGAACTAATG |
| | | | | AATACTATGCAGACTCCGTGAAGGGCCGATTCACCATCTCCAG |
| | | | | AGACACTTCCAAGAACACGCTGTATTTGCAAATGAACAGCCTG |
| | | | | AGAGCTGAGGACACGGCTGTATATTACTGTGCGAGAGAACGAT |
| | | | | ATTTTGACTGGTCTTTTGACTACTGGGGCCAGGGAACCCTGGT |
| | | | | CAGTGTCTCCTCA |
| 374 | 4D2 | artificial | aa | QVQLVESGGGVVQPGRSLRLSCAASGFTFSSYDMHWVRQAPGK |
| | | | | GLEWVAVISYDGTNEYYADSVKGRFTISRDTSKNTLYLQMNSL |
| | | | | RAEDTAVYYCARERYFDWSFDYWGQGTLVSVSS |
| 375 | 4E10 | artificial | nt | CAGGTGCAGCTGGTGGAGTCTGGGGGAGGCGTGGTCCAGCCTG |
| | | | | GGAGGTCCCTGAGACTCTCCTGTGCAGCGTCTGGATTCACCTT |
| | | | | CAGTAGCTATGACATGCACTGGGTCCGCCAGGCTCCAGGCAAG |
| | | | | GGGCTGGAGTGGGTGGCAGTTATATGGTATGATGGAAGTAATA |
| | | | | AATACTATGCAGACTCCGTGAAGGGCCGATTCACCATCTCCAG |
| | | | | AGACAATTCCACGAACACGCTGCATCTGCAAATGAACAGCCCG |
| | | | | AGAGCCGAGGACACGGCTGTGTACTACTGTGCGAGAGAGTATA |
| | | | | GGTACAGCTGGTACTTTGACTACTGGGGCCAGGGAACCCTGGT |
| | | | | CACCGTCTCCTCA |
| 376 | 4E10 | artificial | aa | QVQLVESGGGVVQPGRSLRLSCAASGFTFSSYDMHWVRQAPGK |
| | | | | GLEWVAVIWYDGSNKYYADSVKGRFTISRDNSTNTLHLQMNSP |
| | | | | RAEDTAVYYCAREYRYSWYFDYWGQGTLVTVSS |
| 377 | 22G10 | artificial | nt | GAGGTGCAACTGTTGGAGTCTGGGGGAGGCTTGGTACAGCCTG |
| | | | | GGGGGTCCCTGAGACTCTCCTGTGCAGCCTCTGGATTCACCTT |
| | | | | TAGCAGTTATGCCATGAACTGGGTCCGCCAGGCTCCAGGGAAG |
| | | | | GGGCTGGAGTGGGTCTCAACTATTAGTGGTGGTGGTGCTAACA |
| | | | | CATACTACGCAGACTCCGTGAAGGGCCGGTTCACCATCTCCAG |
| | | | | TGACAATTCCAAGAGCACGCTGTATCTGCAAATGAACAGCCTG |
| | | | | AGAGCCGCGGACACGGCCGTATATCACTGTGCGAAAGGGGGAA |
| | | | | TGGGGGGATACTACTACGGTATGGACGTCTGGGGCCAAGGGAC |
| | | | | CACGGTCACCGTCTCCTCA |
| 378 | 22G10 | artificial | aa | EVQLLESGGGLVQPGGSLRLSCAASGFTFSSYAMNWVRQAPGK |
| | | | | GLEWVSTISGGGANTYYADSVKGRFTISSDNSKSTLYLQMNSL |
| | | | | RAADTAVYHCAKGGMGGYYYGMDVWGQGTTVTVSS |
| 379 | 2C12_LC#1 | artificial | nt | CAGGTGCAGCTGGTGGAGTCTGGGGGAGGCGTGGTCCAGCCTG |
| | | | | GGAGGTCCCTGAGACTCTCCTGTGCAGCGTCTGGATTCACCTT |
| | | | | CAGTAGCTATGGCATGCACTGGGTCCGCCAGGCTCCAGGCAAG |
| | | | | GGGCTGGAGTGGGTGTCAGTTATATGGTATGATGGAAGTAATA |
| | | | | AATACTATGCAGACTCCGTGAAGGGCCGATTCACCATCTCCAG |
| | | | | AGACAATTCCAAGAACACGCTGTATCTGCAAATGAATAGCCTG |
| | | | | AGAGCTGAGGACACGGCTGTGTATTACTGCGCGAGAAGGGCCG |
| | | | | GTATAATAGGAACTACAGGCTACTACTACGGTATGGACGTCTG |
| | | | | GGGCCAAGGGACCACGGTCACCGTCTCCTCA |
| 380 | 2C12_LC#1 | artificial | aa | QVQLVESGGGVVQPGRSLRLSCAASGFTFSSYGMHWVRQAPGK |
| | | | | GLEWVSVIWYDGSNKYYADSVKGRFTISRDNSKNTLYLQMNSL |
| | | | | RAEDTAVYYCARRAGIIGTTGYYYGMDVWGQGTTVTVSS |
| 381 | 2H12_LC#2 | artificial | nt | CAGGTGCAGCTGGTGGAGTCTGGGGGAGGCGTGGTCCAGCCTG |
| | | | | GGAGGTCCCTGAGACTCTCCTGTGCAGCGTCTGGATTCACCTT |
| | | | | CAGTAGCTATGGCATGCACTGGGTCCGCCAGGCTCCAGGCAAG |
| | | | | GGGCTGGAGTGGGTGGCAGTTATATGGTATGATGGAAGTAATA |
| | | | | AATACTATACAGACTCCGTGAAGGGCCGATTCACCATCTCCAG |
| | | | | AGACAATTCCAAGAACACGCTGTATCTGCAAATGAATAGCCTG |
| | | | | AGAGCTGAGGACACGGCTGTGTATTACTGTGCGAGAAGGGCCG |
| | | | | GTATAATAGGAACTACAGGCTACTACTACGGTATGGACGTCTG |
| | | | | GGGCCAAGGGACCACGGTCACCGTCTCCTCA |
| 382 | 2H12_LC#2 | artificial | aa | QVQLVESGGGVVQPGRSLRLSCAASGFTFSSYGMHWVRQAPGK |
| | | | | GLEWVAVIWYDGSNKYYTDSVKGRFTISRDNSKNTLYLQMNSL |
| | | | | RAEDTAVYYCARRAGIIGTTGYYYGMDVWGQGTTVTVSS |
| 383 | 2G6_LC#1 | artificial | nt | CAGGTGCAGTTGGTGGAGTCTGGGGGAGGCGTGGTCCAGCCTG |
| | | | | GGAGGTCCCTGAGACTCTCCTGTGCAGCGTCTGGATTCACCTT |
| | | | | CAGTAGCTATGGCATGCACTGGGTCCGCCAGGCTCCAGGCAAG |
| | | | | GGGCTGGAGTGGGTGGCATTTATATGGTATGATGGAAGTAATA |
| | | | | AATACTATGCAGACTCCGTGAAGGACCGATTCACCATCTCCAG |
| | | | | AGACAATTCCAAGAACACGCTGTATCTGCAAATGAAAAGCCTG |
| | | | | AGAGCTGAGGACACGGCTGTGTATTACTGTGCGAGAAGGGCCG |
| | | | | GTATAATAGGAACTATAGGCTACTACTACGGTATGGACGTCTG |
| | | | | GGGCCAAGGGACCACGGTCACCGTCTCCTCA |
| 384 | 2G6_LC#1 | artificial | aa | QVQLVESGGGVVQPGRSLRLSCAASGFTFSSYGMHWVRQAPGK |
| | | | | GLEWVAFIWYDGSNKYYADSVKDRFTISRDNSKNTLYLQMKSL |
| | | | | RAEDTAVYYCARRAGIIGTIGYYYGMDVWGQGTTVTVSS |
| 385 | 2H12 | artificial | nt | CAGGTGCAGCTGGTGGAGTCTGGGGGAGGCGTGGTCCAGCCTG |
| | | | | GGAGGTCCCTGAGACTCTCCTGTGCAGCGTCTGGATTCACCTT |
| | | | | CAGTAGCTATGGCATGCACTGGGTCCGCCAGGCTCCAGGCAAG |
| | | | | GGGCTGGAGTGGGTGGCAGTTATATGGTATGATGGAAGTAATA |
| | | | | AATACTATACAGACTCCGTGAAGGGCCGATTCACCATCTCCAG |
| | | | | AGACAATTCCAAGAACACGCTGTATCTGCAAATGAATAGCCTG |
| | | | | AGAGCTGAGGACACGGCTGTGTATTACTGTGCGAGAAGGGCCG |
| | | | | GTATAATAGGAACTACAGGCTACTACTACGGTATGGACGTCTG |
| | | | | GGGCCAAGGGACCACGGTCACCGTCTCCTCA |
| 386 | 2H12 | artificial | aa | QVQLVESGGGVVQPGRSLRLSCAASGFTFSSYGMHWVRQAPGK |
| | | | | GLEWVAVIWYDGSNKYYTDSVKGRFTISRDNSKNTLYLQMNSL |
| | | | | RAEDTAVYYCARRAGIIGTTGYYYGMDVWGQGTTVTVSS |
| 387 | 2G6 | artificial | nt | CAGGTGCAGTTGGTGGAGTCTGGGGGAGGCGTGGTCCAGCCTG |
| | | | | GGAGGTCCCTGAGACTCTCCTGTGCAGCGTCTGGATTCACCTT |
| | | | | CAGTAGCTATGGCATGCACTGGGTCCGCCAGGCTCCAGGCAAG |
| | | | | GGGCTGGAGTGGGTGGCATTTATATGGTATGATGGAAGTAATA |
| | | | | AATACTATGCAGACTCCGTGAAGGACCGATTCACCATCTCCAG |
| | | | | AGACAATTCCAAGAACACGCTGTATCTGCAAATGAAAAGCCTG |
| | | | | AGAGCTGAGGACACGGCTGTGTATTACTGTGCGAGAAGGGCCG |
| | | | | GTATAATAGGAACTATAGGCTACTACTACGGTATGGACGTCTG |
| | | | | GGGCCAAGGGACCACGGTCACCGTCTCCTCA |
| 388 | 2G6 | artificial | aa | QVQLVESGGGVVQPGRSLRLSCAASGFTFSSYGMHWVRQAPGK |
| | | | | GLEWVAFIWYDGSNKYYADSVKDRFTISRDNSKNTLYLQMKSL |
| | | | | RAEDTAVYYCARRAGIIGTIGYYYGMDVWGQGTTVTVSS |
| 389 | 23A10 | artificial | nt | CAGGTGCAGCTGGTGGAGTCTGGGGGAGGCGTGGTCCAGCCTG |
| | | | | GGAGGTCCCTGAGACTCTCCTGTGCAGCGTCTGGATTCACCTT |
| | | | | CAGTCGCTATGGCATACACTGGGTCCGCCAGGCTCCAGGCAAG |
| | | | | GGGCTGGAGTGGGTGGCAGTTATATGGTATGATGGAAGTAATA |
| | | | | AATACTATGCAGACTCCGTGAAGGGCCGATTCACCATCTCCAG |
| | | | | AGACAATTCCAAGAACACGCTGTATCTGCTAATGAACAGCCTG |
| | | | | AGAGCCGAGGACTCGGCTGTGTATTACTGTGCGAGAAGGGCCG |
| | | | | GTATACCTGGAACTACGGGCTACTACTATGGTATGGACGTCTG |
| | | | | GGGCCAAGGGACCACGGTCACCGTCTCCTCA |
| 390 | 23A10 | artificial | aa | QVQLVESGGGVVQPGRSLRLSCAASGFTFSRYGIHWVRQAPGK |
| | | | | GLEWVAVIWYDGSNKYYADSVKGRFTISRDNSKNTLYLLMNSL |
| | | | | RAEDSAVYYCARRAGIPGTTGYYYGMDVWGQGTTVTVSS |
| 391 | 5E3 | artificial | nt | GAGGTGCAGTTGGTGGAGTCTGGGGGAGGCCTGGTCAAGCCTG |
| | | | | GGGGGTCCCTGAGACTCTCCTGTGCAGCCTCTGGATTCACCTT |
| | | | | CAGTAGCTATAGCATGCACTGGGTCCGCCAGGCTCCAGGGAAG |
| | | | | GGGCTGGAGTGGGTCTCATCCATTAGTAGTAGTAGTAGTTACA |
| | | | | TATACTACGCAGACTCAGTGAAGGGCCGATTCACCATCTCCAG |
| | | | | AGACAACGCCAAGAACTCACTGTATCTGCAAATGAACAGCCTG |
| | | | | AGAGCCGAGGACACGGCTGTGTATTACTGTGCGAGAGGGGAAA |
| | | | | CTGGAACTAACTACTACTACTACGGTATGGACGTCTGGGGCCA |
| | | | | AGGGACCACGGTCACCGTCTCCTCA |
| 392 | 5E3 | artificial | aa | EVQLVESGGGLVKPGGSLRLSCAASGFTFSSYSMHWVRQAPGK |
| | | | | GLEWVSSISSSSSYIYYADSVKGRFTISRDNAKNSLYLQMNSL |
| | | | | RAEDTAVYYCARGETGTNYYYYGMDVWGQGTTVTVSS |

TABLE IIB
Light Chain Variable Region Polynucleotide and Amino acid Sequences

| SEQ | | | | |
|---|---|---|---|---|
| ID | | | | |
| NO. | DESIGNATION | SOURCE | TYPE | SEQUENCE |
| 393 | 17H8 | artificial | nt | GACATTGTATTGACGCAGtctCCAGGCACCCTGTCTTTGTCTC |
| | 23B6 | | | CAGGGGAAAGAGCCACCCTCTCCTGCAGGGCCAGTCAGAGTGT |
| | 28D10 | | | TGCCGGCAGCTACCTAGCCTGGTACCAGCAGAAACCTGGCCAG |
| | | | | GCTCCCAGGCTCCTCATCTCTGGTGCATCCAGCAGGGCCACTG |
| | | | | GCATCCCAGACAGGTTCAGTGGCAGTGGGTCTGGGACAGACTT |
| | | | | CACTCTCACCATCAGCAGACTGGAGCCTGAAGATTTTGCAGTG |
| | | | | TATTACTGTCAGCAGTATGGTAAATCACCGATCACCTTCGGCC |
| | | | | AAGGGACACGACTGGAGATGAAAGGA |
| 394 | 17H8 | artificial | aa | DIVLTQSPGTLSLSPGERATLSCRASQSVAGSYLAWYQQKPGQ |
| | 23B6 | | | APRLLISGASSRATGIPDRFSGSGSGTDFTLTISRLEPEDFAV |
| | 28D10 | | | YYCQQYGKSPITFGQGTRLEMKG |
| 395 | 4A2 | artificial | nt | GAAATTGTGTTGACGCAGTCTCCAGGCACCCTGTCTTTGTCTC |
| | 5B4 | | | CAGGGGAAAGAGCCACCCTCTCTTGCAGGGCCAGTCGGAATAT |
| | 5C5 | | | TAGCAGCAGCTACTTAGCCTGGTACCAGCAGAAACCTGGCCAG |
| | | | | GCTCCCAGGCTCCTCATCTATGGTCCATCCAGCAGGGCCACTG |
| | | | | GCATCCCAGACAGGTTCAGTGGCAGTGGGTCTGGGACAGACTT |
| | | | | CACTCTCACCATCAGCAGACTGGAGCCTGAAGATTTTACAGTG |
| | | | | TATTACTGTCAGCAGTATGGTAGCTCATTCACTTTCGGCCCTG |
| | | | | GGACCAAAGTGGATATCAAACGA |
| 396 | 4A2 | artificial | aa | EIVLTQSPGTLSLSPGERATLSCRASRNISSSYLAWYQQKPGQ |
| | 5B4 | | | APRLLIYGPSSRATGIPDRFSGSGSGTDFTLTISRLEPEDFTV |
| | 5C5 | | | YYCQQYGSSFTFGPGTKVDIKR |
| 397 | 16H2 | artificial | nt | CAGTCTGCGCTGACTCAGCCACCCTCAGCGACTGGGACCCCCG |
| | 20D3 | | | GGCAGAGGGTCACCATCTCTTGTTCTGGAAGCAGCTCCAACAT |
| | 23E7 | | | CGGAAGTAATTTTGTAAACTGGTACAAACAACTCCCAGGAACG |
| | | | | GCCCCCAAAGTCCTCATCTATACTAATAATCAGCGGCCCTCAG |
| | | | | GGGTCCCTGACCGATTCTCTGGCTCCAAGTCTGGCACCTCAGC |
| | | | | CTCCCTGGCCATCAGTGGGCTCCAGTCTGAGGATGAGTCTGAT |
| | | | | TATTACTGTGCAACATGGGATGACAGCCTGAATGGTTGGGTGT |
| | | | | TCGGCGGAGGGACCAAGCTGACCGTCCTAGGT |
| 398 | 16H2 | artificial | aa | QSALTQPPSATGTPGQRVTISCSGSSSNIGSNFVNWYKQLPGT |
| | 20D3 | | | APKVLIYTNNQRPSGVPDRFSGSKSGTSASLAISGLQSEDESD |
| | 23E7 | | | YYCATWDDSLNGWVFGGGTKLTVLG |
| 399 | 26F12 | artificial | nt | CAGTCTGTGCTGACTCAGTCACCCTCAGCGTCTGGGACCCCCG |
| | 27B3 | | | GGCAGAAGGTCACCATCTCTTGTTCTGGAAGCCGCTCCAACAT |
| | | | | CGGAAGTAATTTTGTAAACTGGTACCAGCAGCTCCCAGGAACG |
| | | | | GCCCCCAAACTCCTCATCTATACTAATTATCAGCGGCCCTCAG |
| | | | | GGGTCCCTGACCGATTCTCTGGCTCCAAGTCTGGCACCTCAGC |
| | | | | CTCCCTGGCCATCAGTGGGCTCCAGTCTGAGGATGAGGCTGAT |
| | | | | TATTACTGTGCAGTATGGGATGACAGCCTGAATGGTTGGGTGT |
| | | | | TCGGCGGAGGGACCAAGCTGACCGTCCTAGGT |
| 400 | 26F12 | artificial | aa | QSVLTQSPSASGTPGQKVTISCSGSRSNIGSNFVNWYQQLPGT |
| | 27B3 | | | APKLLIYTNYQRPSGVPDRFSGSKSGTSASLAISGLQSEDEAD |
| | | | | YYCAVWDDSLNGWVFGGGTKLTVLG |
| 401 | 4B10 | artificial | nt | GAAATTGTATTGACGCAGTCTCCAGGCACCCTGTCTTTGTCTC |
| | 4C2 | | | CAGGGGAAAGAGCCACCCTCTCCTGCAGGGCCAGTCAGAGTGT |
| | | | | TAGCAACACCTACTTAGCCTGGTACCATCAGAGACCTGGCCAG |
| | | | | GCTCCCAGGCTCCTCATCTATGGTGCATCCAGCAGGGCCACTG |
| | | | | GCATCCCAGACAGATTCAGTGGCAGTGGGTCTGGGACAGACTT |
| | | | | CGCTCTCACCATCAGCAGTCTGGAGCCTGAAGATTTTGCAGTG |
| | | | | TATTACTGTCAGCAGTACAGTAACTCgtgGACGTTCGGCCAAG |
| | | | | GGACCAAGGTGGAAATCAaacGA |
| 402 | 4B10 | artificial | aa | EIVLTQSPGTLSLSPGERATLSCRASQSVSNTYLAWYHQRPGQ |
| | 4C2 | | | APRLLIYGASSRATGIPDRFSGSGSGTDFALTISSLEPEDFAV |
| | | | | YYCQQYSNSWTFGQGTKVEIKR |
| 403 | 4D3 | artificial | nt | GAAATTGTGTTGACGCAGTCTCCAGGCACCCTGTCTTTGTCTC |
| | 4F3 | | | CAGGGGAAAGAGCCACCCTCTCCTGCAGGGCCAGTCAGAGTGT |
| | | | | TAGCAGCAGCTACTTAGCCTGGTACCAGCAGAAACCTGGCCAG |
| | | | | GCTCCCAGGCTCCTCATCTATGGTGCATCCAGCAGGGCCACTG |
| | | | | GCATCCCAGACAGGTTCAGTGGCAGTGGGTCTGGGACAGACTT |
| | | | | CACTCTCACCATCAGCAGACTGGAACCTGAGGATTTTGCAGTG |
| | | | | TATTACTGTCAGCAGTATGGTAGCTCGTGGACGTTCGGCCAAG |
| | | | | GGACCAAGGTGGAAATCAAACGA |
| 404 | 4D3 | artificial | aa | EIVLTQSPGTLSLSPGERATLSCRASQSVSSSYLAWYQQKPGQ |
| | 4F3 | | | APRLLIYGASSRATGIPDRFSGSGSGTDFTLTISRLEPEDFAV |
| | | | | YYCQQYGSSWTFGQGTKVEIKR |
| 405 | 16E2 | artificial | nt | GACATCCAGATGACCCAGTCTCCATCCTCACTGTCTGCATCTG |
| | 17E10 | | | TAGGAGACAGAGTCACCATCACTTGTCGGGCGAGTCAGGGCAT |
| | 20B12 | | | TAGCAATTATTTAGCCTGGTTACAGCAGAAACCAGGGAAAGCC |
| | | | | CCTAAGTCCCTGATCTATGCTGCATCCAGTTTGCAAAGTGGGG |
| | | | | TCCCATCAAAGTTCAGCGGCAGTGGATCTGGGACAGATTTCAC |
| | | | | TCTCACCATCAGCAGCCTGCAGCCTGAAGATTTTGCAACTTAT |
| | | | | TACTGCCAACACTATTTTACTTACCCTCGGACGTTCGGCCAAG |
| | | | | GGACCAAGGTGGAAATCAAACGA |
| 406 | 16E2 | artificial | aa | DIQMTQSPSSLSASVGDRVTITCRASQGISNYLAWLQQKPGKA |
| | 17E10 | | | PKSLIYAASSLQSGVPSKFSGSGSGTDFTLTISSLQPEDFATY |
| | 20B12 | | | YCQHYFTYPRTFGQGTKVEIKR |
| 407 | 1D10 | artificial | nt | TCCTATGCGCTGACTCAGCCACCCTCAGTGTCCGTGTCCCCAG |
| | 2C12 | | | GACAGACAGCCAGCCTCACCTGCTCTGGAGATAGATTGGGGGA |
| | | | | AAAATATACTTGCTGGTATCAGCAGAGGCCAGGCCAGTCCCCT |
| | | | | TTGCTGGTCATCTATCAAGATACCAAGCGGCCCTCAGGGATCC |
| | | | | CTGAGCGATTCTCTGGCTCCACCTCTGGTAACACAGCCACTCT |
| | | | | GACCATCAGCGGGACCCAGGCTATGGATGAGGCTGACTATTAC |
| | | | | TGTCAGGCGTGGGACAGCAGCACTGTGGTATTCGGCGGAGGGA |
| | | | | CCAAGCTGACCGTCCTAGGT |
| 408 | 1D10 | artificial | aa | SYALTQPPSVSVSPGQTASLTCSGDRLGEKYTCWYQQRPGQSP |
| | 2C12 | | | LLVIYQDTKRPSGIPERFSGSTSGNTATLTISGTQAMDEADYY |
| | | | | CQAWDSSTVVFGGGTKLTVLG |
| 409 | 16C1 | artificial | nt | GAAATTGTGTTGACGCAGTCTCCAGGCACCCTGTCTTTGTCTC |
| | | | | CAGGGGAAAGAGCCACCCTCTCCTGCAGGGCCAGCCAGAGTGT |
| | | | | TAGCAGCAGCTACTTAGCCTGGTACCAGCAGAAACCTGGCCAG |
| | | | | GCTCCCAGGCTCCTCATCTTTGGTGCATCCAGCAGGGCCACTG |
| | | | | GCATCCCAGACAGGTTCAGTGGCAGTGGGTCTGGGACAGACTT |
| | | | | CACTCTCACCATCAGCGGACTGGAGCCTGAAGATTTTGCAGTG |
| | | | | TATCACTGTCAGCAGTATGGTAACTCACCGCTCACTTTCGGCG |
| | | | | GAGGGACCAAGGTGGAGATCAAACGA |
| 410 | 16C1 | artificial | aa | EIVLTQSPGTLSLSPGERATLSCRASQSVSSSYLAWYQQKPGQ |
| | | | | APRLLIFGASSRATGIPDRFSGSGSGTDFTLTISGLEPEDFAV |
| | | | | YHCQQYGNSPLTFGGGTKVEIKR |
| 411 | 25G10 | artificial | nt | GAAATTGTGTTGACGCAGTCTCCAGGCACCCTGTCTTTGTCTC |
| | | | | CAGGGGAAAGAGCCACCCTCTCCTGCAGGGCCAGTCAGAGTGT |
| | | | | TAGCAGCAGCTACTTAGCCTGGTACCAGCAGAAACCTGGCCAG |
| | | | | GCTCCCAGGCTCCTCATCTTTGGTGCATCCAGCAGGGCCACTG |
| | | | | GCATCCCAGACAGGTTCAGTGGCAGTGGGTCTGGGACAGactT |
| | | | | CACTCTCACCATCAGCAGACTGGAGCCTGAAGATTTTGCAGTG |
| | | | | TATCACTGTCAGCAGTATGGTAACTCACCGCTCACTTTCGGCG |
| | | | | GAGGGACCAAGGTGGAGATCAAACGA |
| 412 | 25G10 | artificial | aa | EIVLTQSPGTLSLSPGERATLSCRASQSVSSSYLAWYQQKPGQ |
| | | | | APRLLIFGASSRATGIPDRFSGSGSGTDFTLTISRLEPEDFAV |
| | | | | YHCQQYGNSPLTFGGGTKVEIKR |
| 413 | 16A4 | artificial | nt | GAAATTGTGTTGACGCAGTCTCCAGGCACCCTGTCTTTGTCTC |
| | | | | CAGGGGAAAGAGCCACCCtCTCCTGCAGGGCCAGTCAGAGTGT |
| | | | | TAGCAGCAGTTATTTAGCCTGGTACCAGCAGAAACCTGGCCAG |
| | | | | GCTCCCAGGCTCCTCATCTATGGTACATCCAGCAGGGCCACTG |
| | | | | GCATCCCAGACAGGTTCAGTGGCAGTGGGTCTGGGACAGACTT |
| | | | | CACTCTCACCATCAGCAGACTGGAGCCTGAAGATTTTGCAGTG |
| | | | | TATTATTGTCAGCAGTACGGTAGCTCACCTTTCACTTTCGGCG |
| | | | | GAGGGACCAAGGTGGAGATCAAACGA |
| 414 | 16A4 | artificial | aa | EIVLTQSPGTLSLSPGERATLSCRASQSVSSSYLAWYQQKPGQ |
| | | | | APRLLIYGTSSRATGIPDRFSGSGSGTDFTLTISRLEPEDFAV |
| | | | | YYCQQYGSSPFTFGGGTKVEIKR |
| 415 | 1F10 | artificial | nt | GAAATTGTGTTGACGCAGTCTCCAGGCACCCTGTCTTTGTCTC |
| | | | | CAGGGGAAAGAGCCACCCTCTCCTGCAGGGCCAGTCGGAGTAT |
| | | | | TAGCAGCAGCTACTTAGCCTGGTACCAGCAGAAACCTGGCCAG |
| | | | | GCTCCCAGGCTCCTCATCTATGGTCCATCCAGCAGGGCCACTG |
| | | | | GCATCCCAGACAGGTTCAGTGGCAGTGGGTCTGGGACAGACTT |
| | | | | CACTCTCACCATCAGCAGACTGGAGCCTGAAGATTTTGCAGTG |
| | | | | TATTACTGTCAGCAGTATGGTAGCTCATTCACTTTCGGCCCTG |
| | | | | GGACCAAAGTGGATATCAAACGA |
| 416 | 1F10 | artificial | aa | EIVLTQSPGTLSLSPGERATLSCRASRSISSSYLAWYQQKPGQ |
| | | | | APRLLIYGPSSRATGIPDRFSGSGSGTDFTLTISRLEPEDFAV |
| | | | | YYCQQYGSSFTFGPGTKVDIKR |
| 417 | 4A9 | artificial | nt | CAGTCTGTGCTGACGCAGCCGCCCTCAGTGTCTGGGGCCCCAG |
| | | | | GACAGAGGGTCACCATCTCCTGCACTGGGAGCAGCTCCAACAT |
| | | | | CGGGACAGGTTATGCTGTACACTGGTACCAGCAGTTTCCAGGA |
| | | | | ACAGCCCCCAAACTCCTCATCTATGGTAACAACAATCGGCCCT |
| | | | | CAGGGGTTCCTGACCGATTCTCTGGCTCCAAGTCTGGCACCTC |
| | | | | AGCCTCCCTGGCCATCACTGGGCTCCAGGCTGAGGATGAGGCT |
| | | | | GATTATTACTGCCAGTCCTATGACAGCAGACTGAGTGGTTGGG |
| | | | | TGTTCGGCGGAGGGACCAAGCTGACCGTCCTAGGT |
| 418 | 4A9 | artificial | aa | QSVLTQPPSVSGAPGQRVTISCTGSSSNIGTGYAVHWYQQFPG |
| | | | | TAPKLLIYGNNNRPSGVPDRFSGSKSGTSASLAITGLQAEDEA |
| | | | | DYYCQSYDSRLSGWVFGGGTKLTVLG |
| 419 | 4F7 | artificial | nt | CAGTCTGTgcTGACGCAGCCGCCCTCAGTGTCTGGGGCCCCAG |
| | | | | GGCAGAGGGTCACCATCTCCTGCACTGGGAGCAGCTCCAATAT |
| | | | | CGGGACAGGTTATGATGTACACTGGTATCAGCAGcttcCAGGA |
| | | | | ACAGCCCCCAAACTCCTCATCCATGGTAACAGCAATCGGCCCT |
| | | | | CAGGGGTCCCTGACCGATTCTCTGGCTCCAAGTCTGGCACCTC |
| | | | | AGCCTCCCTGGCCATCACTGGGCTCCAGGCTGAGGATGAGGCT |
| | | | | GATTATTACTGCCAGTCCTATGACAGCAGTCTGAGTGGTTGGG |
| | | | | TGTTCGGCGGAGGGACCAGGTTGACCGTCCTAGGT |
| 420 | 4F7 | artificial | aa | QSVLTQPPSVSGAPGQRVTISCTGSSSNIGTGYDVHWYQQLPG |
| | | | | TAPKLLIHGNSNRPSGVPDRFSGSKSGTSASLAITGLQAEDEA |
| | | | | DYYCQSYDSSLSGWVFGGGTRLTVLG |
| 421 | 22D1 | artificial | nt | CAGTCTGCGCTGACTCAGCCACCCTCAGCGACTGGGACCCCCG |
| | | | | GGCAGAGGGTCACCATCTCTTGTTCTGGAAGCAGCTCCAACAT |
| | | | | CGGAAGCAATTTTGTAAACTGGTACAAGCAGCTCCCAGGAACG |
| | | | | GCCCCCAAAGTCCTCATCTATACTAATAATCAGCGGCCCTCAG |
| | | | | GGGTCCCTGACCGATTCTCTGGCTCCAAGTCTGGCACCTCAGC |
| | | | | CTCCCTGGCCATCAGTGGGCTCCAGTCTGAGGATGAGTCTGAT |
| | | | | TATTACTGTGCAACATGGGATGACAGTATGAATGGTTGGGTGT |
| | | | | TCGGCGGAGGGACCAAGCTGACCGTCCTAGGT |
| 422 | 22D1 | artificial | aa | QSALTQPPSATGTPGQRVTISCSGSSSNIGSNFVNWYKQLPGT |
| | | | | APKVLIYTNNQRPSGVPDRFSGSKSGTSASLAISGLQSEDESD |
| | | | | YYCATWDDSMNGWVFGGGTKLTVLG |
| 423 | 19B5 | artificial | nt | CAGTCTGCGCTGACTCAGCCACCCTCAACGACTGGGACCCCCG |
| | | | | GGCAGAGGGTCACCATCTCTTGTTCTGGAAGCAGGTCCAACAT |
| | | | | CGGAAGCAATTTTGTAAACTGGTACAAGCAGCTCCCAGGAACG |
| | | | | GCCCCCAAAGTCCTCATCTATACTAATAATCAGCGGCCCTCAG |
| | | | | GGGTCCCTGACCGATTCTCTGGCTCCAAGTCTGGCACCTCAGC |
| | | | | CTCCCTGGCCATCAGTGGGCTCCAGTCTGAGGATGAGTCTGAT |
| | | | | TATTACTGCGCAACATGGGATGACAGTATGAATGGTTGGGTGT |
| | | | | TCGGCGGAGGGACCAAACTGACCGTCCTAGGT |
| 424 | 19B5 | artificial | aa | QSALTQPPSTTGTPGQRVTISCSGSRSNIGSNFVNWYKQLPGT |
| | | | | APKVLIYTNNQRPSGVPDRFSGSKSGTSASLAISGLQSEDESD |
| | | | | YYCATWDDSMNGWVFGGGTKLTVLG |
| 425 | 25F8 | artificial | nt | CAGTCTGCGCTGactCAGCCACCCTCAGCGACTGGGACCCCCG |
| | | | | GGCAGAGGGTCACCATCTCTTGTTCTGGAAGCAGCTCCAACAT |
| | | | | CGGAAGGAATTTTGTAAACTGGTATAAGCAGCTCCCAGGAACG |
| | | | | GCCCCCAAAGTCCTCATTTATACTAATAATCAGCGGCCCTCAG |
| | | | | GGGTCCCTGACCGATTCTCTGGCTCCAAGTCTGGCACCTCAGC |
| | | | | CTCCCTGGCCATCAGTGGGCTCCAGTCTGAGGATGAGTCTGAT |
| | | | | TATTACTGTGCAGCATGGGATGACAGCCTGAATGGTTGGGTGT |
| | | | | TCGGCGGAGGGACCAAGCTGACCGTCCTAGGT |
| 426 | 25F8 | artificial | aa | QSALTQPPSATGTPGQRVTISCSGSSSNIGRNFVNWYKQLPGT |
| | | | | APKVLIYTNNQRPSGVPDRFSGSKSGTSASLAISGLQSEDESD |
| | | | | YYCAAWDDSLNGWVFGGGTKLTVLG |
| 427 | 26D1 | artificial | nt | CACTCTGTGCTGACTCAGTCACCCTCAGCGTCTGGGACCCCCG |
| | | | | GACAGAGGGTCACCATCTCTTGTTCTGGAAGCCGCTCCAACAT |
| | | | | CGGAAGTAATTTTGTAAACTGGTACCAGCAGCTCCCAGGAACG |
| | | | | GCCCCCAAACTCCTCATCTATACTAATAATCAGCGGCCCTCAG |
| | | | | GGGTCCCTGACCGATTCTCTGGCTCCAAGTCTGGCACCTCAGC |
| | | | | CTCCCTGGCCATCAGTGGGCTCCAGTCTGAGGATGAGGCTGAT |
| | | | | TATTACTGTGCAGTATGGGATGACAGCCTGAATGGTTGGGTGT |
| | | | | TCGGCGGAGGGACCAAGCTGACCGTCCTAGGT |
| 428 | 26D1 | artificial | aa | HSVLTQSPSASGTPGQRVTISCSGSRSNIGSNFVNWYQQLPGT |
| | | | | APKLLIYTNNQRPSGVPDRFSGSKSGTSASLAISGLQSEDEAD |
| | | | | YYCAVWDDSLNGWVFGGGTKLTVLG |
| 429 | 4D2 | artificial | nt | GAAATTGTATTGACGCAGTCTCCAGGCACCCTGTCTTTGTCTC |
| | | | | CAGGGGAAAGAGCCACCCTCTCCTGCAGGGCCAGTCAGAGTGT |
| | | | | TAGCAACACCTACTTAGCCTGGTACCATCAGAGACCTGGCCAG |
| | | | | GCTCCCAGGCTCCTCATCTATGGTGCATCCAGCAGGGCCGCTG |
| | | | | GCATCCCAGACAGGTTCAGTGGCAGTGGGTCTGGGACAGACTT |
| | | | | CACTCTCACCATCAGCAGACTGGAGCCTGAAGATTTTGCAGTG |
| | | | | TATTACTGTCAGCAGTATAGTAACTCGTGGACGTTCGGCCAAG |
| | | | | GGACCAAGGTGGAAATCAAACGA |
| 430 | 4D2 | artificial | aa | EIVLTQSPGTLSLSPGERATLSCRASQSVSNTYLAWYHQRPGQ |
| | | | | APRLLIYGASSRAAGIPDRFSGSGSGTDFTLTISRLEPEDFAV |
| | | | | YYCQQYSNSWTFGQGTKVEIKR |
| 431 | 4E10 | artificial | nt | GAAATTGTGTTGACGCAGTCTCCAGGCACCCTGTCTTTGTCTC |
| | | | | CAGGGGAAAGAGCCACCCTCTCCTGCAGGGCCAGTCAGAGTGT |
| | | | | TGGCAGCAGCTACTTAGCCTGGTACCAGCAGAAACCTGGCCAG |
| | | | | GCTCCCAGGCTCCTCATCTATGGTGCATCCAGCAGGGTCACTG |
| | | | | GCATCCCAGACAGGTTCAGTGGCAGTGGGTCTGGGACAGATTT |
| | | | | CACTCTCACCATCAGCAGACTGGAGCCTGAAGATTTTGCAGTG |
| | | | | TATTACTGTCAGCAATATAGTAACTCGTGGACGTTCGGCCAAG |
| | | | | GGACCAAGGTGGAAATCAAACGA |
| 432 | 4E10 | artificial | aa | EIVLTQSPGTLSLSPGERATLSCRASQSVGSSYLAWYQQKPGQ |
| | | | | APRLLIYGASSRVTGIPDRFSGSGSGTDFTLTISRLEPEDFAV |
| | | | | YYCQQYSNSWTFGQGTKVEIKR |
| 433 | 22G10 | artificial | nt | GAAATAGTGATGACGCAGTCTCCAGTCACCCTGTCTCTGTCTC |
| | | | | TAGGGGAAAGAGCCACCCTCTCCTGCAGGGCCAGTCAGAGTAT |
| | | | | TAGCAGCAACTTAGCCTGGTTCCAGCAGAAACCTGGCCAGGCT |
| | | | | CCCAGACTCCTCATCTATGGTGCATTTACCAGGGCCACTGGTA |
| | | | | TCCCAGCCAGGGTCAGTGGCAGTGGGTCTGGGACAGAGTTCAC |
| | | | | TCTCACCATCAGCAGCCTGCAGTCTGAAGATTTTGCAGTTTAT |
| | | | | TACTGTCAGCAGTATAATTACTGGCCGCTCACTTTCGGCGGAG |
| | | | | GGACCAAGGTGGAGATCAAGCGA |
| 434 | 22G10 | artificial | aa | EIVMTQSPVTLSLSLGERATLSCRASQSISSNLAWFQQKPGQA |
| | | | | PRLLIYGAFTRATGIPARVSGSGSGTEFTLTISSLQSEDFAVY |
| | | | | YCQQYNYWPLTFGGGTKVEIKR |
| 435 | 2C12_LC#1 | artificial | nt | GATGTTGTGATGactCAGtCTccActctccctgcCCGTCACCC |
| | | | | TTGGACAGCCGGcctCCAtctcctgCAGGtCTAGTCAAAGcct |
| | | | | cgtaTACAGTGATGGAAACAcctACTTGAATTGGTTTCAGCAG |
| | | | | AGGCCAGGCCAATCTCCAAGGcgcctaATTTATAAGGTTTCTA |
| | | | | ACTGGGactctGGGGtCCCAGACAGATTCAGCgGCAGTGGGTC |
| | | | | AGGCActGATTTCACactGAAAAtCAGCAGGGTGGaggctgaG |
| | | | | GATGTTGGGGTTTATTactgCATGCAAGGTATAGTGTGGCCGT |
| | | | | GCAGTTTTGGCCAGGGGACCAAGCTGGAGATCAAaCgA |
| 436 | 2C12_LC#1 | artificial | aa | DVVMTQSPLSLPVTLGQPASISCRSSQSLVYSDGNTYLNWFQQ |
| | | | | RPGQSPRRLIYKVSNWDSGVPDRFSGSGSGTDFTLKISRVEAE |
| | | | | DVGVYYCMQGIVWPCSFGQGTKLEIKR |
| 437 | 2H12_LC#2 | artificial | nt | GATGTTGTGATGACTCAGTCTCCACTCTCCCTGCCCGTCACCC |
| | | | | TTGGACAGCCGGCCTCCATCTCCTGCAGGTCTAGTCAAAGCCT |
| | | | | CGTATACAGTGATGGAAACACCTACTTGAATTGGTTTCAGCAG |
| | | | | AGGCCAGGCCAATCTCCAAGGCGCCTAATTTATAAGGTTTCTA |
| | | | | ACTGGGACTCTGGGGTCCCAGACAGAATCAGCGGCAGTGGGTC |
| | | | | AGGCACCGATTTCACACTGAAAATCAGCAGGGTGGAGGCTGAG |
| | | | | GATGTTGGGGTTTATTACTGCATGCAAGATACACTGTGGCCGT |
| | | | | GCAGTTTTGGCCAGGGGACCAAGCTGGAGATCAAACGA |
| 438 | 2H12_LC#2 | artificial | aa | DVVMTQSPLSLPVTLGQPASISCRSSQSLVYSDGNTYLNWFQQ |
| | | | | RPGQSPRRLIYKVSNWDSGVPDRISGSGSGTDFTLKISRVEAE |
| | | | | DVGVYYCMQDTLWPCSFGQGTKLEIKR |
| 439 | 2G6_LC#1 | artificial | nt | GaTGTTGTGATGACTCagtctccACTCTCCCTGCCCGTCACCC |
| | | | | ttggacaGCCGGCCTccaTCTCCTGCAGGTCTAGTCAAAGCCT |
| | | | | CGTATACAGTGATGGAAACACCTACTTGAATTGGTTTCAGCAG |
| | | | | AGGCCAGGCCAATCTCCACGGCGCCTAATTTATCAGGTTTCTA |
| | | | | ACTGGGACTCTGGGGTCCCAGACAGATTCAGCGGCAGTGGGTC |
| | | | | AGGCACTGATTTCACACTGAAAATCAGCAGGGTGGAGGCTGAG |
| | | | | GATGTTGGGATTTATTACTGCATGCAAGATACACTGTGGCCGT |
| | | | | GCAGTTTTGGCCAGGGGACCAAGCTGGAGATCAAACGA |
| 440 | 2G6_LC#1 | artificial | aa | DVVMTQSPLSLPVTLGQPASISCRSSQSLVYSDGNTYLNWFQQ |
| | | | | RPGQSPRRLIYQVSNWDSGVPDRFSGSGSGTDFTLKISRVEAE |
| | | | | DVGIYYCMQDTLWPCSFGQGTKLEIKR |
| 441 | 2H12 | artificial | nt | TCCTATGAGCTGACTCAGCCACCCTCAGTGTCCGTGTCCCCAG |
| | | | | GACAGACAGCCAGCATCACCTGCTCTGGAGATAGATTGGGGGA |
| | | | | AAAATATACTTGCTGGTATCAGCAGAGGCCAGGCCAGTCCCCT |
| | | | | TTGCTGGTCATCTATCAAGATACCAAGCGGCCCTCAGGGATCC |
| | | | | CTGAGCGATTCTCTGGCTCCAACTCTGGTAACACAGCCACTCT |
| | | | | GACCATCAGCGGGACCCAGCCTATGGATGAGGCTGACTATTAC |
| | | | | TGTCAGGCGTGGGACAGCAGCACTGTGGTATTCGGCGGAGGGA |
| | | | | CCAAGCTGACCGTCCtAGGT |
| 442 | 2H12 | artificial | aa | SYELTQPPSVSVSPGQTASITCSGDRLGEKYTCWYQQRPGQSP |
| | | | | LLVIYQDTKRPSGIPERFSGSNSGNTATLTISGTQPMDEADYY |
| | | | | CQAWDSSTVVFGGGTKLTVLG |
| 443 | 2G6 | artificial | nt | TCCTATGAACTGACTCAGCCACCCTCAGTGTCCGTGTCCCCAG |
| | | | | GACAGACAGCCAGCATCACCTGCTCTGGAGATAGGTTGGGGGA |
| | | | | AAAATATACTTGCTGGTATCAGCAGAGGCCAGGCCAGTCCCCT |
| | | | | TTGCTGGTCATCTATCAAGATACCAAGCGGCCCTCAGGGATCC |
| | | | | CTGAGCGATTCTCTGGCTCCAACTCTGGTAACACAGCCACTCT |
| | | | | GACCATCAGCGGGACCCAGGCTATGGATGAGGCTGACTATTAC |
| | | | | TGTCAGGCGTGGGACAGCAGCACTGTGGTATTCGGCGGAGGGA |
| | | | | CCAAGCTGACCGTCCTAGGT |
| 444 | 2G6 | artificial | aa | SYELTQPPSVSVSPGQTASITCSGDRLGEKYTCWYQQRPGQSP |
| | | | | LLVIYQDTKRPSGIPERFSGSNSGNTATLTISGTQAMDEADYY |
| | | | | CQAWDSSTVVFGGGTKLTVLG |
| 445 | 23A10 | artificial | nt | TCCTATGAGCTGACTCAGCCACCCTCAGTGTCCGTGTCCCCAG |
| | | | | GACAGACAGCCAGCATCACCTGCTCTGGAGATAGATTGGGGGA |
| | | | | GAAATATGTTTGCTGGTATCAGCAGAAGCCAGGCCAGTCCCCT |
| | | | | ATACTGGTCATCTATCAAGATAATAAGTGGCCCTCAGGGATCC |
| | | | | CTGAGCGATTCTCTGGCTCCAACTCTGGGAACACAGCCACTCT |
| | | | | GACCATCAGCGGGACCCAGGCTATGGATGAGGCTGACTATTAC |
| | | | | TGTCAGGCGTGGGACAGCAGCACTGTGGTATTCGGCGGGGGGA |
| | | | | CCAAGCTGACCGTCCTAGGT |
| 446 | 23A10 | artificial | aa | SYELTQPPSVSVSPGQTASITCSGDRLGEKYVCWYQQKPGQSP |
| | | | | ILVIYQDNKWPSGIPERFSGSNSGNTATLTISGTQAMDEADYY |
| | | | | CQAWDSSTVVFGGGTKLTVLG |
| 447 | 5E3 | artificial | nt | TCCTATGAGCTGACTCAGCCACCCTCAGTGTCCGTGTCCCCAG |
| | | | | GACAGACAGCCAGCATCACCTGCTCTGGAGATAAATTGGGGGA |
| | | | | TGAATATGCTTGCTGGTATCAGCAGAAGCCAGGCCAGTCCCCT |
| | | | | GTGCTGGTCATCTATCAAGATAGCAAGCGGCCCTCAGGGATCC |
| | | | | CTGAGCGATTCTCTGGCTCCAACTCTGGGAACACAGCCACTCT |
| | | | | GACCATCAGCGGGACCCAGGCTATGGATGAGGCTGACTATTAC |
| | | | | TGTCAGGCGTGGGACAGCAGCACTGTGGTATTCGGCGGAGGGA |
| | | | | CCAAGCTGACCGTCCTAGGT |
| 448 | 5E3 | artificial | aa | SYELTQPPSVSVSPGQTASITCSGDKLGDEYACWYQQKPGQSP |
| | | | | VLVIYQDSKRPSGIPERFSGSNSGNTATLTISGTQAMDEADYY |
| | | | | CQAWDSSTVVFGGGTKLTVLG |

TABLE IIc
Heavy Chain Variable Region Polynucleotide and Amino acid Sequences

13586_HC [hu anti-<huCDH19> 4F3 VH]
QVQLVESGGGVVQPGRSLRLSCAASGFSFSSYDMDWVRQTPGKGLEWVAVIWYDGSNKYYADSVRG
RFTISRDNSKNTLFLQMNSLRVEDTAVYYCARETGEGWYFDLWGRGTLVTVSS
SEQ ID NO: 449
13589_HC [hu anti-<huCDH19> 4A9 VH]
QVQLQESGPGLVKPSETLSLTCTVSGGSISGYYWSWIRQPPGKGLEWFAYFSYSGSTNYNPSLKSRVTLS
VDTSKNQFSLKLSSVTAADTAVYYCARNWAFHFDFWGQGTLVTVSS
SEQ ID NO: 450
13590_HC [hu anti-<huCDH19> 4B10 VH]
QVQLVESGGGVVQPGRSLRLSCAASGFTFSSYDMHWVRQAPGKGLEWVAVISYDGTNEYYADSVKGR
FTISRDTSKNTLYLQMNSLRAEDTAVYYCARERYFDWSFDYWGQGTLVSVSS
SEQ ID NO: 451
13874_HC [hu anti-<huCDH19> 17H8.2 VH]
QVQLQESGPGLVKPSETLSLTCTVSGGSINSYYWSWIRQPPGKGLEWIGYIYYIGSTNYNPSLKSRVTISV
DTSKNQFSLKLSSVTAADTALYYCARDSRYRSGWYDAFDIWGQGTMVTVSS
SEQ ID NO: 452
13875_HC [hu anti-<huCDH19> 16C1.1 VH]
QVQLQESGPGLVKPSETLSLTCTVSGGSISGYYWSWIRQPPGKGLEWIGYIYYIGSTNYNPSLKSRVTMS
IDTSKNQFSLTLSSLTAADTAVYFCARDGSSGWYRWFDPWGQGTLVTVSS
SEQ ID NO: 453
13876_HC [hu anti-<huCDH19> 16A4.1 VH]
QVQLQESGPGLAKPSETLSLTCTVSGDSITSYYWSWIRQPPGKGLEWIGYIYYSGSTNYNPSLKSRVTISV
DTSKNQFSLKLSSVTAADTAVYYCARDQRRIAAAGTHFYGMDVWGQGTTVTVSS
SEQ ID NO: 454
13877_HC [hu anti-<huCDH19> 22G10.1 VH]
EVQLLESGGGLVQPGGSLRLSCAASGFTFSSYAMNWVRQAPGKGLEWVSTISGGGANTYYADSVKGR
FTISSDNSKSTLYLQMNSLRAADTAVYHCAKGGMGGYYYGMDVWGQGTTVTVSS
SEQ ID NO: 455
13878_HC [hu anti-<huCDH19> 20D3.1 VH]
QVQLVQSGAEVKKPGASVKVSCKVSGYTFTSYFIHWVRQAPGQGLEWMGIINPISVSTSYAQKFQGRV
TMTRDTSTSTVFMELSSLRSEDTAVYYCARGGIQLWLHFDYWGQGTLVTVSS
SEQ ID NO: 456
13879_HC [hu anti-<huCDH19> 22D1.1 VH]
QVQLVQSGAEVKKPGASVRVSCKVSGYTFTSYFIHWVRQAPGQGLEWMGIINPISVSTSYAQKFQGRV
TMTRDTSTSTVFMELSSLRSEDTAVYYCARGGIQLWLHLDYWGQGTLVTVSS
SEQ ID NO: 457
13880_HC [hu anti-<huCDH19> 25F8.1 VH]
QVQLVQSGAEVKKPGASVKVSCKASGYTFTSYYIHWVRQAPGQGLEWMGIINPSGGSTRYAQKFQGR
VTMTRDTSTSTVFMELSSLRSEDTAVYYCARGGIQLWLHFDYWGQGTLVTVSS
SEQ ID NO: 458
13881_HC [hu anti-<huCDH19> 26F12.1 VH]
QVQLVQSGAEVKKPGASVKVSCKASRYTFTNYYMSWVRQAPGQGLEWMGIINPSGGDSTYAQKFQG
RLTMTGDTSTSTVYMELSSLRSEDTAVYYCARGGIQLWLHFDYWGQGTLVTVSS
SEQ ID NO: 459
13882_HC [hu anti-<huCDH19> 26D1.1 VH]
QVQLVQSGAEVKKPGASVKVSCKASRYTFTSYYMSWVRQAPGQGLEWMGIIHPSGGDTTYAQKFQGR
VTMTGDTSTSTVYMELSSLRSEDTAVYYCARGGIKLWLHFDYWGQGTLVTVSS
SEQ ID NO: 460
13883_HC [hu anti-<huCDH19> 25G10.1 VH]
QVQLQESGPGLVKPSETLSLTCTVSGGSISGYYWSWIRQPPGKGLEWIGYIYYIGSTNYNPSLKSRVTMS
VDTSKNQFSLKLSSVTAADTAVYYCARDGSSGWYRWFDPWGQGTLVTVSS
SEQ ID NO: 461
13885_HC [hu anti-<huCDH19> 19B5.1 VH]
QVQLVQSGAEVKKPGASVKVSCKVSGYTFTSYFIHWVRQAPGQGLEWMGIINPISVSTSYAQKFQGRV
TMTRDTSTSTVFMELSSLRSEDTAVYYCARGGIQLWLHLDYWGQGTLVTVSS
SEQ ID NO: 462
14022_HC [hu anti-<huCDH19> 4A2 VH]
QVQLQESGPGLVKPSQTLSLTCTVSGGSISSSGYYWSWIRQHPGKGLEWIGYIYYTGSAYYNPSLKSRV
TISVDTSKNQFSLKLSSVTAADTAVYYCARDGSSGWYFQYWGQGTLVTVSS
SEQ ID NO: 463
14024_HC [hu anti-<huCDH19> 4A2 (1-472)(Q17E, 1147P) VH]
QVQLQESGPGLVKPSETLSLTCTVSGGSISSSGYYWSWIRQPPGKGLEWIGYIYYTGSAYYNPSLKSRVT
ISVDTSKNQFSLKLSSVTAADTAVYYCARDGSSGWYFQYWGQGTLVTVSS
SEQ ID NO: 464
14025_HC [hu anti-<huCDH19> 4A2 VH]
QVQLQESGPGLVKPSQTLSLTCTVSGGSISSSGYYWSWIRQHPGKGLEWIGYIYYTGSAYYNPSLKSRV
TISVDTSKNQFSLKLSSVTAADTAVYYCARDGSSGWYFQYWGQGTLVTVSS
SEQ ID NO: 465
14026_HC [hu anti-<huCDH19> 4A2 (1-472)(Q17E, 1147P) VH]
QVQLQESGPGLVKPSETLSLTCTVSGGSISSSGYYWSWIRQPPGKGLEWIGYIYYTGSAYYNPSLKSRVT
ISVDTSKNQFSLKLSSVTAADTAVYYCARDGSSGWYFQYWGQGTLVTVSS
SEQ ID NO: 466
14027_HC [hu anti-<huCDH19> 4A2 (1-472)(Q17E, H47P, D111E) VH]
QVQLQESGPGLVKPSETLSLTCTVSGGSISSSGYYWSWIRQPPGKGLEWIGYIYYTGSAYYNPSLKSRVT
ISVDTSKNQFSLKLSSVTAADTAVYYCAREGSSGWYFQYWGQGTLVTVSS
SEQ ID NO: 467
14028_HC [hu anti-<huCDH19> 4A2 (1-472)(Q17E, H47P, D111E, W134Y) VH]
QVQLQESGPGLVKPSETLSLTCTVSGGSISSSGYYWSWIRQPPGKGLEWIGYIYYTGSAYYNPSLKSRVT
ISVDTSKNQFSLKLSSVTAADTAVYYCAREGSSGYYFQYWGQGTLVTVSS
SEQ ID NO: 468
14029_HC [hu anti-<huCDH19> 4A2 VH]
QVQLQESGPGLVKPSQTLSLTCTVSGGSISSSGYYWSWIRQHPGKGLEWIGYIYYTGSAYYNPSLKSRV
TISVDTSKNQFSLKLSSVTAADTAVYYCARDGSSGWYFQYWGQGTLVTVSS
SEQ ID NO: 469
14030_HC [hu anti-<huCDH19> 4F3 (1-471)(R17G) VH]
QVQLVESGGGVVQPGGSLRLSCAASGFSFSSYDMDWVRQTPGKGLEWVAVIWYDGSNKYYADSVRG
RFTISRDNSKNTLFLQMNSLRVEDTAVYYCARETGEGWYFDLWGRGTLVTVSS
SEQ ID NO: 470
14031_HC [hu anti-<huCDH19> 4F3 (1-471)(R17G, T47A) VH]
QVQLVESGGGVVQPGGSLRLSCAASGFSFSSYDMDWVRQAPGKGLEWVAVIWYDGSNKYYADSVRG
RFTISRDNSKNTLFLQMNSLRVEDTAVYYCARETGEGWYFDLWGRGTLVTVSS
SEQ ID NO: 471
14032_HC [hu anti-<huCDH19> 4F3 (1-471)(R17G, T47A, R141Q) VH]
QVQLVESGGGVVQPGGSLRLSCAASGFSFSSYDMDWVRQAPGKGLEWVAVIWYDGSNKYYADSVRG
RFTISRDNSKNTLFLQMNSLRVEDTAVYYCARETGEGWYFDLWGQGTLVTVSS
SEQ ID NO: 472
14033_HC [hu anti-<huCDH19> 4F3 (1-471)(R17G, T47A, D61E, D72E, R141Q) VH]
QVQLVESGGGVVQPGGSLRLSCAASGFSFSSYDMDWVRQAPGKGLEWVAVIWYEGSNKYYAESVRG
RFTISRDNSKNTLFLQMNSLRVEDTAVYYCARETGEGWYFDLWGQGTLVTVSS
SEQ ID NO: 473
14034_HC [hu anti-<huCDH19> 4F3 (1-471)(R17G, T47A, D61E, D72E, W134Y,
R141Q) VH]
QVQLVESGGGVVQPGGSLRLSCAASGFSFSSYDMDWVRQAPGKGLEWVAVIWYEGSNKYYAESVRG
RFTISRDNSKNTLFLQMNSLRVEDTAVYYCARETGEGYYFDLWGQGTLVTVSS
SEQ ID NO: 474
14039_HC [hu anti-<huCDH19> 2G6 (1-477)(R17G, D61E, D72E, K94N) VH]
QVQLVESGGGVVQPGGSLRLSCAASGFTFSSYGMHWVRQAPGKGLEWVAFIWYEGSNKYYAESVKD
RFTISRDNSKNTLYLQMNSLRAEDTAVYYCARRAGIIGTIGYYYGMDVWGQGTTVTVSS
SEQ ID NO: 475
14040_HC [hu anti-<huCDH19> 16C1.1 VH]
QVQLQESGPGLVKPSETLSLTCTVSGGSISGYYWSWIRQPPGKGLEWIGYIYYIGSTNYNPSLKSRVTMS
IDTSKNQFSLTLSSLTAADTAVYFCARDGSSGWYRWFDPWGQGTLVTVSS
SEQ ID NO: 476
14041_HC [hu anti-<huCDH19> 16C1.1 (1-469)(T92K) VH]
QVQLQESGPGLVKPSETLSLTCTVSGGSISGYYWSWIRQPPGKGLEWIGYIYYIGSTNYNPSLKSRVTMS
IDTSKNQFSLKLSSLTAADTAVYFCARDGSSGWYRWFDPWGQGTLVTVSS
SEQ ID NO: 477
14042_HC [hu anti-<huCDH19> 16C1.1 (1-469)(T92K, D109E) VH]
QVQLQESGPGLVKPSETLSLTCTVSGGSISGYYWSWIRQPPGKGLEWIGYIYYIGSTNYNPSLKSRVTMS
IDTSKNQFSLKLSSLTAADTAVYFCAREGSSGWYRWFDPWGQGTLVTVSS
SEQ ID NO: 478
14043_HC [hu anti-<huCDH19> 16C1.1 (1-469)(T92K, W132Y, W135Y) VH]
QVQLQESGPGLVKPSETLSLTCTVSGGSISGYYWSWIRQPPGKGLEWIGYIYYIGSTNYNPSLKSRVTMS
IDTSKNQFSLKLSSLTAADTAVYFCARDGSSGYYRYFDPWGQGTLVTVSS
SEQ ID NO: 479
14044_HC [hu anti-<huCDH19> 16C1.1 (1-469)(T92K) VH]
QVQLQESGPGLVKPSETLSLTCTVSGGSISGYYWSWIRQPPGKGLEWIGYIYYIGSTNYNPSLKSRVTMS
IDTSKNQFSLKLSSLTAADTAVYFCARDGSSGWYRWFDPWGQGTLVTVSS
SEQ ID NO: 480
14045_HC [hu anti-<huCDH19> 17H8.2 VH]
QVQLQESGPGLVKPSETLSLTCTVSGGSINSYYWSWIRQPPGKGLEWIGYIYYIGSTNYNPSLKSRVTISV
DTSKNQFSLKLSSVTAADTALYYCARDSRYRSGWYDAFDIWGQGTMVTVSS
SEQ ID NO: 481
14046_HC [hu anti-<huCDH19> 17H8.2 (1-471)(D109E) VH]
QVQLQESGPGLVKPSETLSLTCTVSGGSINSYYWSWIRQPPGKGLEWIGYIYYIGSTNYNPSLKSRVTISV
DTSKNQFSLKLSSVTAADTALYYCARESRYRSGWYDAFDIWGQGTMVTVSS
SEQ ID NO: 482
14047_HC [hu anti-<huCDH19> 17H8.2 (1-471)(D109E, W132Y) VH]
QVQLQESGPGLVKPSETLSLTCTVSGGSINSYYWSWIRQPPGKGLEWIGYIYYIGSTNYNPSLKSRVTISV
DTSKNQFSLKLSSVTAADTALYYCARESRYRSGYYDAFDIWGQGTMVTVSS
SEQ ID NO: 483
14048_HC [hu anti-<huCDH19> 17H8.2 (1-471)(D109E) VH]
QVQLQESGPGLVKPSETLSLTCTVSGGSINSYYWSWIRQPPGKGLEWIGYIYYIGSTNYNPSLKSRVTISV
DTSKNQFSLKLSSVTAADTALYYCARESRYRSGWYDAFDIWGQGTMVTVSS
SEQ ID NO: 484
14049_HC [hu anti-<huCDH19> 4F7 VH]
QVQLQESGPGLVKPSETLSLTCTVSGGSISSYSWSWIRQPPGKGLEWIGYIYYSGSTNYNPSLKSRVTISL
DTSKNQFSLKLSSVTAADTAVYYCARNWAFHFDYWGQGTLVTVSS
SEQ ID NO: 485
14050_HC [hu anti-<huCDH19> 4F7 VH]
QVQLQESGPGLVKPSETLSLTCTVSGGSISSYSWSWIRQPPGKGLEWIGYIYYSGSTNYNPSLKSRVTISL
DTSKNQFSLKLSSVTAADTAVYYCARNWAFHFDYWGQGTLVTVSS
SEQ ID NO: 486
14051_HC [hu anti-<huCDH19> 4F7 (1-468)(W113Y) VH]
QVQLQESGPGLVKPSETLSLTCTVSGGSISSYSWSWIRQPPGKGLEWIGYIYYSGSTNYNPSLKSRVTISL
DTSKNQFSLKLSSVTAADTAVYYCARNYAFHFDYWGQGTLVTVSS
SEQ ID NO: 487
14052_HC [hu anti-<huCDH19> 4B10 (1-471)(R17G, D61E, D72E, W134Y) VH]
QVQLVESGGGVVQPGGSLRLSCAASGFTFSSYDMHWVRQAPGKGLEWVAVISYEGTNEYYAESVKGR
FTISRDTSKNTLYLQMNSLRAEDTAVYYCARERYFDYSFDYWGQGTLVSVSS
SEQ ID NO: 488
14053_HC [hu anti-<huCDH19> 4B10 VH]
QVQLVESGGGVVQPGRSLRLSCAASGFTFSSYDMHWVRQAPGKGLEWVAVISYDGTNEYYADSVKGR
FTISRDTSKNTLYLQMNSLRAEDTAVYYCARERYFDWSFDYWGQGTLVSVSS
SEQ ID NO: 489
14054_HC [hu anti-<huCDH19> 4B10 (1-471)(R17G) VH]
QVQLVESGGGVVQPGGSLRLSCAASGFTFSSYDMHWVRQAPGKGLEWVAVISYDGTNEYYADSVKG
RFTISRDTSKNTLYLQMNSLRAEDTAVYYCARERYFDWSFDYWGQGTLVSVSS
SEQ ID NO: 490
14055_HC [hu anti-<huCDH19> 4B10 (1-471)(R17G, D61E, D72E) VH]
QVQLVESGGGVVQPGGSLRLSCAASGFTFSSYDMHWVRQAPGKGLEWVAVISYEGTNEYYAESVKGR
FTISRDTSKNTLYLQMNSLRAEDTAVYYCARERYFDWSFDYWGQGTLVSVSS
SEQ ID NO: 491
14056_HC [hu anti-<huCDH19> 4A9 VH]
QVQLQESGPGLVKPSETLSLTCTVSGGSISGYYWSWIRQPPGKGLEWFAYFSYSGSTNYNPSLKSRVTLS
VDTSKNQFSLKLSSVTAADTAVYYCARNWAFHFDFWGQGTLVTVSS
SEQ ID NO: 492
14057_HC [hu anti-<huCDH19> 4A9 (1-468)(F55I, A56G) VH]
QVQLQESGPGLVKPSETLSLTCTVSGGSISGYYWSWIRQPPGKGLEWIGYFSYSGSTNYNPSLKSRVTLS
VDTSKNQFSLKLSSVTAADTAVYYCARNWAFHFDFWGQGTLVTVSS
SEQ ID NO: 493
14058_HC [hu anti-<huCDH19> 4A9 (1-468)(F55I, A56G) VH]
QVQLQESGPGLVKPSETLSLTCTVSGGSISGYYWSWIRQPPGKGLEWIGYFSYSGSTNYNPSLKSRVTLS
VDTSKNQFSLKLSSVTAADTAVYYCARNWAFHFDFWGQGTLVTVSS
SEQ ID NO: 494
14059_HC [hu anti-<huCDH19> 4A9 (1-468)(F55I, A56G, W113Y) VH]
QVQLQESGPGLVKPSETLSLTCTVSGGSISGYYWSWIRQPPGKGLEWIGYFSYSGSTNYNPSLKSRVTLS
VDTSKNQFSLKLSSVTAADTAVYYCARNYAFHFDFWGQGTLVTVSS
SEQ ID NO: 495
14060_HC [hu anti-<huCDH19> 20D3.1 VH]
QVQLVQSGAEVKKPGASVKVSCKVSGYTFTSYFIHWVRQAPGQGLEWMGIINPISVSTSYAQKFQGRV
TMTRDTSTSTVFMELSSLRSEDTAVYYCARGGIQLWLHFDYWGQGTLVTVSS
SEQ ID NO: 496
14061_HC [hu anti-<huCDH19> 20D3.1 VH]
QVQLVQSGAEVKKPGASVKVSCKVSGYTFTSYFIHWVRQAPGQGLEWMGIINPISVSTSYAQKFQGRV
TMTRDTSTSTVFMELSSLRSEDTAVYYCARGGIQLWLHFDYWGQGTLVTVSS
SEQ ID NO: 497
14062_HC [hu anti-<huCDH19> 20D3.1 (1-469)(W133Y) VH]
QVQLVQSGAEVKKPGASVKVSCKVSGYTFTSYFIHWVRQAPGQGLEWMGIINPISVSTSYAQKFQGRV
TMTRDTSTSTVFMELSSLRSEDTAVYYCARGGIQLYLHFDYWGQGTLVTVSS
SEQ ID NO: 498
14063_HC [hu anti-<huCDH19> 20D3.1 (1-469)(W133Y) VH]
QVQLVQSGAEVKKPGASVKVSCKVSGYTFTSYFIHWVRQAPGQGLEWMGIINPISVSTSYAQKFQGRV
TMTRDTSTSTVFMELSSLRSEDTAVYYCARGGIQLYLHFDYWGQGTLVTVSS
SEQ ID NO: 499
14064_HC [hu anti-<huCDH19> 20D3.1 (1-469)(W133Y) VH]
QVQLVQSGAEVKKPGASVKVSCKVSGYTFTSYFIHWVRQAPGQGLEWMGIINPISVSTSYAQKFQGRV
TMTRDTSTSTVFMELSSLRSEDTAVYYCARGGIQLYLHFDYWGQGTLVTVSS
SEQ ID NO: 500
14065_HC [hu anti-<huCDH19> 22G10.1 (1-470)(S82R, A99E) VH]
EVQLLESGGGLVQPGGSLRLSCAASGFTFSSYAMNWVRQAPGKGLEWVSTISGGGANTYYADSVKGR
FTISRDNSKSTLYLQMNSLRAEDTAVYHCAKGGMGGYYYGMDVWGQGTTVTVSS
SEQ ID NO: 501
14066_HC [hu anti-<huCDH19> 22G10.1 (1-470)(A99E, H105Y) VH]
EVQLLESGGGLVQPGGSLRLSCAASGFTFSSYAMNWVRQAPGKGLEWVSTISGGGANTYYADSVKGR
FTISSDNSKSTLYLQMNSLRAEDTAVYYCAKGGMGGYYYGMDVWGQGTTVTVSS
SEQ ID NO: 502
14067_HC [hu anti-<huCDH19> 22G10.1 (1-470)(A99E) VH]
EVQLLESGGGLVQPGGSLRLSCAASGFTFSSYAMNWVRQAPGKGLEWVSTISGGGANTYYADSVKGR
FTISSDNSKSTLYLQMNSLRAEDTAVYHCAKGGMGGYYYGMDVWGQGTTVTVSS
SEQ ID NO: 503
14068_HC [hu anti-<huCDH19> 22G10.1 (1-470)(A99E) VH]
EVQLLESGGGLVQPGGSLRLSCAASGFTFSSYAMNWVRQAPGKGLEWVSTISGGGANTYYADSVKGR
FTISSDNSKSTLYLQMNSLRAEDTAVYHCAKGGMGGYYYGMDVWGQGTTVTVSS
SEQ ID NO: 504
14069_HC [hu anti-<huCDH19> 22G10.1 (1-470)(D72E, A99E) VH]
EVQLLESGGGLVQPGGSLRLSCAASGFTFSSYAMNWVRQAPGKGLEWVSTISGGGANTYYAESVKGRF
TISSDNSKSTLYLQMNSLRAEDTAVYHCAKGGMGGYYYGMDVWGQGTTVTVSS
SEQ ID NO: 505
14070_HC [hu anti-<huCDH19> 22G10.1 (1-470)(H105Y) VH]
EVQLLESGGGLVQPGGSLRLSCAASGFTFSSYAMNWVRQAPGKGLEWVSTISGGGANTYYADSVKGR
FTISSDNSKSTLYLQMNSLRAADTAVYYCAKGGMGGYYYGMDVWGQGTTVTVSS
SEQ ID NO: 506
14071_HC [hu anti-<huCDH19> 16A4.1 (1-474)(T144L) VH]
QVQLQESGPGLAKPSETLSLTCTVSGDSITSYYWSWIRQPPGKGLEWIGYIYYSGSTNYNPSLKSRVTISV
DTSKNQFSLKLSSVTAADTAVYYCARDQRRIAAAGTHFYGMDVWGQGTLVTVSS
SEQ ID NO: 507
14072_HC [hu anti-<huCDH19> 19B5.1 VH]
QVQLVQSGAEVKKPGASVKVSCKVSGYTFTSYFIHWVRQAPGQGLEWMGIINPISVSTSYAQKFQGRV
TMTRDTSTSTVFMELSSLRSEDTAVYYCARGGIQLWLHLDYWGQGTLVTVSS
SEQ ID NO: 508
14073_HC [hu anti-<huCDH19> 19B5.1 (1-469)(W133Y) VH]
QVQLVQSGAEVKKPGASVKVSCKVSGYTFTSYFIHWVRQAPGQGLEWMGIINPISVSTSYAQKFQGRV
TMTRDTSTSTVFMELSSLRSEDTAVYYCARGGIQLYLHLDYWGQGTLVTVSS
SEQ ID NO: 509
14074_HC [hu anti-<huCDH19> 19B5.1 VH]
QVQLVQSGAEVKKPGASVKVSCKVSGYTFTSYFIHWVRQAPGQGLEWMGIINPISVSTSYAQKFQGRV
TMTRDTSTSTVFMELSSLRSEDTAVYYCARGGIQLWLHLDYWGQGTLVTVSS
SEQ ID NO: 510
14075_HC [hu anti-<huCDH19> 19B5.1 VH]
QVQLVQSGAEVKKPGASVKVSCKVSGYTFTSYFIHWVRQAPGQGLEWMGIINPISVSTSYAQKFQGRV
TMTRDTSTSTVFMELSSLRSEDTAVYYCARGGIQLWLHLDYWGQGTLVTVSS
SEQ ID NO: 511
14076_HC [hu anti-<huCDH19> 19B5.1 (1-469)(W133Y) VH]
QVQLVQSGAEVKKPGASVKVSCKVSGYTFTSYFIHWVRQAPGQGLEWMGIINPISVSTSYAQKFQGRV
TMTRDTSTSTVFMELSSLRSEDTAVYYCARGGIQLYLHLDYWGQGTLVTVSS
SEQ ID NO: 512
14077_HC [hu anti-<huCDH19> 23A10.3 (1-474)(L920) VH]
QVQLVESGGGVVQPGRSLRLSCAASGFTFSRYGIHWVRQAPGKGLEWVAVIWYDGSNKYYADSVKGR
FTISRDNSKNTLYLQMNSLRAEDSAVYYCARRAGIPGTTGYYYGMDVWGQGTTVTVSS
SEQ ID NO: 513
14078_HC [hu anti-<huCDH19> 23A10.3 (1-474)(R17G, L92Q) VH]
QVQLVESGGGVVQPGGSLRLSCAASGFTFSRYGIHWVRQAPGKGLEWVAVIWYDGSNKYYADSVKG
RFTISRDNSKNTLYLQMNSLRAEDSAVYYCARRAGIPGTTGYYYGMDVWGQGTTVTVSS
SEQ ID NO: 514
14079_HC [hu anti-<huCDH19> 23A10.3 (1-474)(R17G, D61E, D72E, L92Q) VH]
QVQLVESGGGVVQPGGSLRLSCAASGFTFSRYGIHWVRQAPGKGLEWVAVIWYEGSNKYYAESVKGR
FTISRDNSKNTLYLQMNSLRAEDSAVYYCARRAGIPGTTGYYYGMDVWGQGTTVTVSS
SEQ ID NO: 515
14080_HC [hu anti-<huCDH19> 23A10.3 VH]
QVQLVESGGGVVQPGRSLRLSCAASGFTFSRYGIHWVRQAPGKGLEWVAVIWYDGSNKYYADSVKGR
FTISRDNSKNTLYLLMNSLRAEDSAVYYCARRAGIPGTTGYYYGMDVWGQGTTVTVSS
SEQ ID NO: 516
14081_HC [hu anti-<huCDH19> 25G10.1 VH]
QVQLQESGPGLVKPSETLSLTCTVSGGSISGYYWSWIRQPPGKGLEWIGYIYYIGSTNYNPSLKSRVTMS
VDTSKNQFSLKLSSVTAADTAVYYCARDGSSGWYRWFDPWGQGTLVTVSS
SEQ ID NO: 517
14082_HC [hu anti-<huCDH19> 25G10.1 (1-469)(D109E, W132Y, W135Y) VH]
QVQLQESGPGLVKPSETLSLTCTVSGGSISGYYWSWIRQPPGKGLEWIGYIYYIGSTNYNPSLKSRVTMS
VDTSKNQFSLKLSSVTAADTAVYYCAREGSSGYYRYFDPWGQGTLVTVSS
SEQ ID NO: 518
14083_HC [hu anti-<huCDH19> 26D1.1 VH]
QVQLVQSGAEVKKPGASVKVSCKASRYTFTSYYMSWVRQAPGQGLEWMGIIHPSGGDTTYAQKFQGR
VTMTGDTSTSTVYMELSSLRSEDTAVYYCARGGIKLWLHFDYWGQGTLVTVSS
SEQ ID NO: 519
14084_HC [hu anti-<huCDH19> 26D1.1 VH]
QVQLVQSGAEVKKPGASVKVSCKASRYTFTSYYMSWVRQAPGQGLEWMGIIHPSGGDTTYAQKFQGR
VTMTGDTSTSTVYMELSSLRSEDTAVYYCARGGIKLWLHFDYWGQGTLVTVSS
SEQ ID NO: 520
14085_HC [hu anti-<huCDH19> 26D1.1 VH]
QVQLVQSGAEVKKPGASVKVSCKASRYTFTSYYMSWVRQAPGQGLEWMGIIHPSGGDTTYAQKFQGR
VTMTGDTSTSTVYMELSSLRSEDTAVYYCARGGIKLWLHFDYWGQGTLVTVSS
SEQ ID NO: 521
14086_HC [hu anti-<huCDH19> 26D1.1 VH]
QVQLVQSGAEVKKPGASVKVSCKASRYTFTSYYMSWVRQAPGQGLEWMGIIHPSGGDTTYAQKFQGR
VTMTGDTSTSTVYMELSSLRSEDTAVYYCARGGIKLWLHFDYWGQGTLVTVSS
SEQ ID NO: 522
14087_HC [hu anti-<huCDH19> 26D1.1 (1-469)(W133Y) VH]
QVQLVQSGAEVKKPGASVKVSCKASRYTFTSYYMSWVRQAPGQGLEWMGIIHPSGGDTTYAQKFQGR
VTMTGDTSTSTVYMELSSLRSEDTAVYYCARGGIKLYLHFDYWGQGTLVTVSS
SEQ ID NO: 523
14088_HC [hu anti-<huCDH19> 26D1.1 (1-469)(R27G, G82R) VH]
QVQLVQSGAEVKKPGASVKVSCKASGYTFTSYYMSWVRQAPGQGLEWMGIIHPSGGDTTYAQKFQGR
VTMTRDTSTSTVYMELSSLRSEDTAVYYCARGGIKLWLHFDYWGQGTLVTVSS
SEQ ID NO: 524
14089_HC [hu anti-<huCDH19> 26F12.1 VH]
QVQLVQSGAEVKKPGASVKVSCKASRYTFTNYYMSWVRQAPGQGLEWMGIINPSGGDSTYAQKFQG
RLTMTGDTSTSTVYMELSSLRSEDTAVYYCARGGIQLWLHFDYWGQGTLVTVSS
SEQ ID NO: 525
14090_HC [hu anti-<huCDH19> 26F12.1 VH]
QVQLVQSGAEVKKPGASVKVSCKASRYTFTNYYMSWVRQAPGQGLEWMGIINPSGGDSTYAQKFQG
RLTMTGDTSTSTVYMELSSLRSEDTAVYYCARGGIQLWLHFDYWGQGTLVTVSS
SEQ ID NO: 526
14091_HC [hu anti-<huCDH19> 26F12.1 (1-469)(W133Y) VH]
QVQLVQSGAEVKKPGASVKVSCKASRYTFTNYYMSWVRQAPGQGLEWMGIINPSGGDSTYAQKFQG
RLTMTGDTSTSTVYMELSSLRSEDTAVYYCARGGIQLYLHFDYWGQGTLVTVSS
SEQ ID NO: 527
14092_HC [hu anti-<huCDH19> 26F12.1 (1-469)(W133Y) VH]
QVQLVQSGAEVKKPGASVKVSCKASRYTFTNYYMSWVRQAPGQGLEWMGIINPSGGDSTYAQKFQG
RLTMTGDTSTSTVYMELSSLRSEDTAVYYCARGGIQLYLHFDYWGQGTLVTVSS
SEQ ID NO: 528
14093_HC [hu anti-<huCDH19> 25F8.1 VH]
QVQLVQSGAEVKKPGASVKVSCKASGYTFTSYYIHWVRQAPGQGLEWMGIINPSGGSTRYAQKFQGR
VTMTRDTSTSTVFMELSSLRSEDTAVYYCARGGIQLWLHFDYWGQGTLVTVSS
SEQ ID NO: 529
14094_HC [hu anti-<huCDH19> 25F8.1 VH]
QVQLVQSGAEVKKPGASVKVSCKASGYTFTSYYIHWVRQAPGQGLEWMGIINPSGGSTRYAQKFQGR
VTMTRDTSTSTVFMELSSLRSEDTAVYYCARGGIQLWLHFDYWGQGTLVTVSS
SEQ ID NO: 530
14095_HC [hu anti-<huCDH19> 25F8.1 (1-469)(F90Y) VH]
QVQLVQSGAEVKKPGASVKVSCKASGYTFTSYYIHWVRQAPGQGLEWMGIINPSGGSTRYAQKFQGR
VTMTRDTSTSTVYMELSSLRSEDTAVYYCARGGIQLWLHFDYWGQGTLVTVSS
SEQ ID NO: 531
14096_HC [hu anti-<huCDH19> 25F8.1 (1-469)(F90Y) VH]
QVQLVQSGAEVKKPGASVKVSCKASGYTFTSYYIHWVRQAPGQGLEWMGIINPSGGSTRYAQKFQGR
VTMTRDTSTSTVYMELSSLRSEDTAVYYCARGGIQLWLHFDYWGQGTLVTVSS
SEQ ID NO: 532
14097_HC [hu anti-<huCDH19> 25F8.1 (1-469)(F90Y, W133Y) VH]
QVQLVQSGAEVKKPGASVKVSCKASGYTFTSYYIHWVRQAPGQGLEWMGIINPSGGSTRYAQKFQGR
VTMTRDTSTSTVYMELSSLRSEDTAVYYCARGGIQLYLHFDYWGQGTLVTVSS
SEQ ID NO: 533
14098_HC [hu anti-<huCDH19> 22D1.1 VH]
QVQLVQSGAEVKKPGASVRVSCKVSGYTFTSYFIHWVRQAPGQGLEWMGIINPISVSTSYAQKFQGRV
TMTRDTSTSTVFMELSSLRSEDTAVYYCARGGIQLWLHLDYWGQGTLVTVSS
SEQ ID NO: 534
14099_HC [hu anti-<huCDH19> 22D1.1 VH]
QVQLVQSGAEVKKPGASVRVSCKVSGYTFTSYFIHWVRQAPGQGLEWMGIINPISVSTSYAQKFQGRV
TMTRDTSTSTVFMELSSLRSEDTAVYYCARGGIQLWLHLDYWGQGTLVTVSS
SEQ ID NO: 535
14100_HC [hu anti-<huCDH19> 22D1.1 (1-469)(W133Y) VH]
QVQLVQSGAEVKKPGASVRVSCKVSGYTFTSYFIHWVRQAPGQGLEWMGIINPISVSTSYAQKFQGRV
TMTRDTSTSTVFMELSSLRSEDTAVYYCARGGIQLYLHLDYWGQGTLVTVSS
SEQ ID NO: 536
14101_HC [hu anti-<huCDH19> 22D1.1 (1-469)(W133Y) VH]
QVQLVQSGAEVKKPGASVRVSCKVSGYTFTSYFIHWVRQAPGQGLEWMGIINPISVSTSYAQKFQGRV
TMTRDTSTSTVFMELSSLRSEDTAVYYCARGGIQLYLHLDYWGQGTLVTVSS
SEQ ID NO: 537
14102_HC [hu anti-<huCDH19> 22D1.1 (1-469)(F90Y) VH]
QVQLVQSGAEVKKPGASVRVSCKVSGYTFTSYFIHWVRQAPGQGLEWMGIINPISVSTSYAQKFQGRV
TMTRDTSTSTVYMELSSLRSEDTAVYYCARGGIQLWLHLDYWGQGTLVTVSS
SEQ ID NO: 538
13591_HC [hu anti-<huCDH19> 4F7 VH]
QVQLQESGPGLVKPSETLSLTCTVSGGSISSYSWSWIRQPPGKGLEWIGYIYYSGSTNYNPSLKSRVTISL
DTSKNQFSLKLSSVTAADTAVYYCARNWAFHFDYWGQGTLVTVSS
SEQ ID NO: 539
14301_HC [hu anti-<huCDH19> 2G6 VH]
QVQLVESGGGVVQPGRSLRLSCAASGFTFSSYGMHWVRQAPGKGLEWVAFIWYDGSNKYYADSVKD
RFTISRDNSKNTLYLQMKSLRAEDTAVYYCARRAGIIGTIGYYYGMDVWGQGTTVTVSS
SEQ ID NO: 540
14302_HC [hu anti-<huCDH19> 2G6 (1-477)(R17G, K94N) VH]
QVQLVESGGGVVQPGGSLRLSCAASGFTFSSYGMHWVRQAPGKGLEWVAFIWYDGSNKYYADSVKD
RFTISRDNSKNTLYLQMNSLRAEDTAVYYCARRAGIIGTIGYYYGMDVWGQGTTVTVSS
SEQ ID NO: 541
14303_HC [hu anti-<huCDH19> 2G6 (1-477)(D61E, D72E) VH]
QVQLVESGGGVVQPGRSLRLSCAASGFTFSSYGMHWVRQAPGKGLEWVAFIWYEGSNKYYAESVKD
RFTISRDNSKNTLYLQMKSLRAEDTAVYYCARRAGIIGTIGYYYGMDVWGQGTTVTVSS
SEQ ID NO: 542
14304_HC [hu anti-<huCDH19> 2G6 (1-477)(R17G) VH]
QVQLVESGGGVVQPGGSLRLSCAASGFTFSSYGMHWVRQAPGKGLEWVAFIWYDGSNKYYADSVKD
RFTISRDNSKNTLYLQMKSLRAEDTAVYYCARRAGIIGTIGYYYGMDVWGQGTTVTVSS
SEQ ID NO: 543

TABLE IId
Light Chain Variable Region Amino acid Sequences

13586_LC [hu anti-<huCDH19> 4F3 VL]
EIVLTQSPGTLSLSPGERATLSCRASQSVSSSYLAWYQQKPGQAPRLLIYGASSRATGIPDRFSGSGSGTD
FTLTISRLEPEDFAVYYCQQYGSSWTFGQGTKVEIKR
SEQ ID NO: 544
13589_LC [hu anti-<huCDH19> 4A9 VL]
QSVLTQPPSVSGAPGQRVTISCTGSSSNIGTGYAVHWYQQFPGTAPKLLIYGNNNRPSGVPDRFSGSKSG
TSASLAITGLQAEDEADYYCQSYDSRLSGWVFGGGTKLTVLG
SEQ ID NO: 545
13590_LC [hu anti-<huCDH19> 4B10 VL]
EIVLTQSPGTLSLSPGERATLSCRASQSVSNTYLAWYHQRPGQAPRLLIYGASSRATGIPDRFSGSGSGTD
FALTISSLEPEDFAVYYCQQYSNSWTFGQGTKVEIKR
SEQ ID NO: 546
13874_LC [hu anti-<huCDH19> 17H8.2 VL]
DIVLTQSPGTLSLSPGERATLSCRASQSVAGSYLAWYQQKPGQAPRLLISGASSRATGIPDRFSGSGSGT
DFTLTISRLEPEDFAVYYCQQYGKSPITFGQGTRLEMKG
SEQ ID NO: 547
13875_LC [hu anti-<huCDH19> 16C1.1 VL]
EIVLTQSPGTLSLSPGERATLSCRASQSVSSSYLAWYQQKPGQAPRLLIFGASSRATGIPDRFSGSGSGTD
FTLTISGLEPEDFAVYHCQQYGNSPLTFGGGTKVEIKR
SEQ ID NO: 548
13876_LC [hu anti-<huCDH19> 16A4.1 VL]
EIVLTQSPGTLSLSPGERATLSCRASQSVSSSYLAWYQQKPGQAPRLLIYGTSSRATGIPDRFSGSGSGTD
FTLTISRLEPEDFAVYYCQQYGSSPFTFGGGTKVEIKR
SEQ ID NO: 549
13877_LC [hu anti-<huCDH19> 22G10.1 VL]
EIVMTQSPVTLSLSLGERATLSCRASQSISSNLAWFQQKPGQAPRLLIYGAFTRATGIPARVSGSGSGTEF
TLTISSLQSEDFAVYYCQQYNYWPLTFGGGTKVEIKR
SEQ ID NO: 552
13878_LC [hu anti-<huCDH19> 20D3.1 VL]
QSALTQPPSATGTPGQRVTISCSGSSSNIGSNFVNWYKQLPGTAPKVLIYTNNQRPSGVPDRFSGSKSGTS
ASLAISGLQSEDESDYYCATWDDSLNGWVFGGGTKLTVLG
SEQ ID NO: 554
13879_LC [hu anti-<huCDH19> 22D1.1 VL]
QSALTQPPSATGTPGQRVTISCSGSSSNIGSNFVNWYKQLPGTAPKVLIYTNNQRPSGVPDRFSGSKSGTS
ASLAISGLQSEDESDYYCATWDDSMNGWVFGGGTKLTVLG
SEQ ID NO: 555
13880_LC [hu anti-<huCDH19> 25F8.1 VL]
QSALTQPPSATGTPGQRVTISCSGSSSNIGRNFVNWYKQLPGTAPKVLIYTNNQRPSGVPDRFSGSKSGT
SASLAISGLQSEDESDYYCAAWDDSLNGWVFGGGTKLTVLG
SEQ ID NO: 556
13881_LC [hu anti-<huCDH19> 26F12.1 VL]
QSVLTQSPSASGTPGQKVTISCSGSRSNIGSNFVNWYQQLPGTAPKLLIYTNYQRPSGVPDRFSGSKSGTS
ASLAISGLQSEDEADYYCAVWDDSLNGWVFGGGTKLTVLG
SEQ ID NO: 557
13882_LC [hu anti-<huCDH19> 26D1.1 VL]
HSVLTQSPSASGTPGQRVTISCSGSRSNIGSNFVNWYQQLPGTAPKLLIYTNNQRPSGVPDRFSGSKSGTS
ASLAISGLQSEDEADYYCAVWDDSLNGWVFGGGTKLTVLG
SEQ ID NO: 555
13883_LC [hu anti-<huCDH19> 25G10.1 VL]
EIVLTQSPGTLSLSPGERATLSCRASQSVSSSYLAWYQQKPGQAPRLLIFGASSRATGIPDRFSGSGSGTD
FTLTISRLEPEDFAVYHCQQYGNSPLTFGGGTKVEIKR
SEQ ID NO: 556
13885_LC [hu anti-<huCDH19> 19B5.1 VIA
QSALTQPPSTTGTPGQRVTISCSGSRSNIGSNFVNWYKQLPGTAPKVLIYTNNQRPSGVPDRFSGSKSGTS
ASLAISGLQSEDESDYYCATWDDSMNGWVFGGGTKLTVLG
SEQ ID NO: 557
14022_LC [hu anti-<huCDH19> 4A2 (1-236)(N30Q) VL]
EIVLTQSPGTLSLSPGERATLSCRASRQISSSYLAWYQQKPGQAPRLLIYGPSSRATGIPDRFSGSGSGTDF
TLTISRLEPEDFTVYYCQQYGSSFTFGPGTKVDIKR
SEQ ID NO: 558
14024_LC [hu anti-<huCDH19> 4A2 (1-236)(N30Q, T102A, P141Q) VL]
EIVLTQSPGTLSLSPGERATLSCRASRQISSSYLAWYQQKPGQAPRLLIYGPSSRATGIPDRFSGSGSGTDF
TLTISRLEPEDFAVYYCQQYGSSFTFGQGTKVDIKR
SEQ ID NO: 559
14025_LC [hu anti-<huCDH19> 4A2 (1-236)(N30Q, T102A) VL]
EIVLTQSPGTLSLSPGERATLSCRASRQISSSYLAWYQQKPGQAPRLLIYGPSSRATGIPDRFSGSGSGTDF
TLTISRLEPEDFAVYYCQQYGSSFTFGPGTKVDIKR
SEQ ID NO: 560
14026_LC [hu anti-<huCDH19> 4A2 (1-236)(N30Q, T102A) VL]
EIVLTQSPGTLSLSPGERATLSCRASRQISSSYLAWYQQKPGQAPRLLIYGPSSRATGIPDRFSGSGSGTDF
TLTISRLEPEDFAVYYCQQYGSSFTFGPGTKVDIKR
SEQ ID NO: 561
14027_LC [hu anti-<huCDH19> 4A2 (1-236)(N30Q, T102A, P141Q) VL]
EIVLTQSPGTLSLSPGERATLSCRASRQISSSYLAWYQQKPGQAPRLLIYGPSSRATGIPDRFSGSGSGTDF
TLTISRLEPEDFAVYYCQQYGSSFTFGQGTKVDIKR
SEQ ID NO: 562
14028_LC [hu anti-<huCDH19> 4A2 (1-236)(N30Q, T102A, P141Q) VL]
EIVLTQSPGTLSLSPGERATLSCRASRQISSSYLAWYQQKPGQAPRLLIYGPSSRATGIPDRFSGSGSGTDF
TLTISRLEPEDFAVYYCQQYGSSFTFGQGTKVDIKR
SEQ ID NO: 563
14029_LC [hu anti-<huCDH19> 4A2 (1-236)(R29Q, N30S) VL]
EIVLTQSPGTLSLSPGERATLSCRASQSISSSYLAWYQQKPGQAPRLLIYGPSSRATGIPDRFSGSGSGTDF
TLTISRLEPEDFTVYYCQQYGSSFTFGPGTKVDIKR
SEQ ID NO: 564
14030_LC [hu anti-<huCDH19> 4F3 VL]
EIVLTQSPGTLSLSPGERATLSCRASQSVSSSYLAWYQQKPGQAPRLLIYGASSRATGIPDRFSGSGSGTD
FTLTISRLEPEDFAVYYCQQYGSSWTFGQGTKVEIKR
SEQ ID NO: 565
14031_LC [hu anti-<huCDH19> 4F3 VL]
EIVLTQSPGTLSLSPGERATLSCRASQSVSSSYLAWYQQKPGQAPRLLIYGASSRATGIPDRFSGSGSGTD
FTLTISRLEPEDFAVYYCQQYGSSWTFGQGTKVEIKR
SEQ ID NO: 566
14032_LC [hu anti-<huCDH19> 4F3 VL]
EIVLTQSPGTLSLSPGERATLSCRASQSVSSSYLAWYQQKPGQAPRLLIYGASSRATGIPDRFSGSGSGTD
FTLTISRLEPEDFAVYYCQQYGSSWTFGQGTKVEIKR
SEQ ID NO: 567
14033_LC [hu anti-<huCDH19> 4F3 VL]
EIVLTQSPGTLSLSPGERATLSCRASQSVSSSYLAWYQQKPGQAPRLLIYGASSRATGIPDRFSGSGSGTD
FTLTISRLEPEDFAVYYCQQYGSSWTFGQGTKVEIKR
SEQ ID NO: 568
14034_LC [hu anti-<huCDH19> 4F3 VL]
EIVLTQSPGTLSLSPGERATLSCRASQSVSSSYLAWYQQKPGQAPRLLIYGASSRATGIPDRFSGSGSGTD
FTLTISRLEPEDFAVYYCQQYGSSWTFGQGTKVEIKR
SEQ ID NO: 569
14039_LC [hu anti-<huCDH19> 2G6 (1-234)(C42S, D110E) VL]
SYELTQPPSVSVSPGQTASITCSGDRLGEKYTSWYQQRPGQSPLLVIYQDTKRPSGIPERFSGSNSGNTAT
LTISGTQAMDEADYYCQAWESSTVVFGGGTKLTVLG
SEQ ID NO: 570
14040_LC [hu anti-<huCDH19> 16C1.1 (1-235)(H105Y) VL]
EIVLTQSPGTLSLSPGERATLSCRASQSVSSSYLAWYQQKPGQAPRLLIFGASSRATGIPDRFSGSGSGTD
FTLTISGLEPEDFAVYYCQQYGNSPLTFGGGTKVEIKR
SEQ ID NO: 571
14041_LC [hu anti-<huCDH19> 16C1.1 (1-235)(H105Y) VL]
EIVLTQSPGTLSLSPGERATLSCRASQSVSSSYLAWYQQKPGQAPRLLIFGASSRATGIPDRFSGSGSGTD
FTLTISGLEPEDFAVYYCQQYGNSPLTFGGGTKVEIKR
SEQ ID NO: 572
14042_LC [hu anti-<huCDH19> 16C1.1 (1-235)(H105Y) VL]
EIVLTQSPGTLSLSPGERATLSCRASQSVSS SYLAWYQQKPGQAPRLLIFGASSRATGIPDRFSGSGSGTD
FTLTISGLEPEDFAVYYCQQYGNSPLTFGGGTKVEIKR
SEQ ID NO: 573
14043_LC [hu anti-<huCDH19> 16C1.1 (1-235)(H105Y) VL]
EIVLTQSPGTLSLSPGERATLSCRASQSVSS SYLAWYQQKPGQAPRLLIFGASSRATGIPDRFSGSGSGTD
FTLTISGLEPEDFAVYYCQQYGNSPLTFGGGTKVEIKR
SEQ ID NO: 574
14044_LC [hu anti-<huCDH19> 16C1.1 (1-235)(G95R, H105Y, G141Q) VL]
EIVLTQSPGTLSLSPGERATLSCRASQSVSSSYLAWYQQKPGQAPRLLIFGASSRATGIPDRFSGSGSGTD
FTLTISRLEPEDFAVYYCQQYGNSPLTFGQGTKVEIKR
SEQ ID NO: 575
14045_LC [hu anti-<huCDH19> 17H8.2 (1-235)(G149R) VL]
DIVLTQSPGTLSLSPGERATLSCRASQSVAGSYLAWYQQKPGQAPRLLISGASSRATGIPDRFSGSGSGT
DFTLTISRLEPEDFAVYYCQQYGKSPITFGQGTRLEMKR
SEQ ID NO: 576
14046_LC [hu anti-<huCDH19> 17H8.2 (1-235)(G149R) VL]
DIVLTQSPGTLSLSPGERATLSCRASQSVAGSYLAWYQQKPGQAPRLLISGASSRATGIPDRFSGSGSGT
DFTLTISRLEPEDFAVYYCQQYGKSPITFGQGTRLEMKR
SEQ ID NO: 577
14047_LC [hu anti-<huCDH19> 17H8.2 (1-235)(G149R) VL]
DIVLTQSPGTLSLSPGERATLSCRASQSVAGSYLAWYQQKPGQAPRLLISGASSRATGIPDRFSGSGSGT
DFTLTISRLEPEDFAVYYCQQYGKSPITFGQGTRLEMKR
SEQ ID NO: 578
14048_LC [hu anti-<huCDH19> 17H8.2 (1-235)(S57Y, G149R) VL]
DIVLTQSPGTLSLSPGERATLSCRASQSVAGSYLAWYQQKPGQAPRLLIYGASSRATGIPDRFSGSGSGT
DFTLTISRLEPEDFAVYYCQQYGKSPITFGQGTRLEMKR
SEQ ID NO: 579
14049_LC [hu anti-<huCDH19> 4F7 (1-239)(H57Y) VL]
QSVLTQPPSVSGAPGQRVTISCTGSSSNIGTGYDVHWYQQLPGTAPKLLIYGNSNRPSGVPDRFSGSKSG
TSASLAITGLQAEDEADYYCQSYDSSLSGWVFGGGTRLTVLG
SEQ ID NO: 580
14050_LC [hu anti-<huCDH19> 4F7 (1-239)(H57Y, D110E) VL]
QSVLTQPPSVSGAPGQRVTISCTGSSSNIGTGYDVHWYQQLPGTAPKLLIYGNSNRPSGVPDRFSGSKSG
TSASLAITGLQAEDEADYYCQSYESSLSGWVFGGGTRLTVLG
SEQ ID NO: 581
14051_LC [hu anti-<huCDH19> 4F7 (1-239)(D110E) VL]
QSVLTQPPSVSGAPGQRVTISCTGSSSNIGTGYDVHWYQQLPGTAPKLLIHGNSNRPSGVPDRFSGSKSG
TSASLAITGLQAEDEADYYCQSYESSLSGWVFGGGTRLTVLG
SEQ ID NO: 582
14052_LC [hu anti-<huCDH19> 4B10 (1-236)(H450, A90T) VL]
EIVLTQSPGTLSLSPGERATLSCRASQSVSNTYLAWYQQRPGQAPRLLIYGASSRATGIPDRFSGSGSGTD
FTLTISSLEPEDFAVYYCQQYSNSWTFGQGTKVEIKR
SEQ ID NO: 583
14053_LC [hu anti-<huCDH19> 4B10 (1-236)(H45Q, A90T) VL]
EIVLTQSPGTLSLSPGERATLSCRASQSVSNTYLAWYQQRPGQAPRLLIYGASSRATGIPDRFSGSGSGTD
FTLTISSLEPEDFAVYYCQQYSNSWTFGQGTKVEIKR
SEQ ID NO: 584
14054_LC [hu anti-<huCDH19> 4B10 (1-236)(H45Q, A90T) VL]
EIVLTQSPGTLSLSPGERATLSCRASQSVSNTYLAWYQQRPGQAPRLLIYGASSRATGIPDRFSGSGSGTD
FTLTISSLEPEDFAVYYCQQYSNSWTFGQGTKVEIKR
SEQ ID NO: 585
14055_LC [hu anti-<huCDH19> 4B10 (1-236)(H45Q, A90T) VL]
EIVLTQSPGTLSLSPGERATLSCRASQSVSNTYLAWYQQRPGQAPRLLIYGASSRATGIPDRFSGSGSGTD
FTLTISSLEPEDFAVYYCQQYSNSWTFGQGTKVEIKR
SEQ ID NO: 586
14056_LC [hu anti-<huCDH19> 4A9 (1-239)(F47L) VL]
QSVLTQPPSVSGAPGQRVTISCTGSSSNIGTGYAVHWYQQLPGTAPKLLIYGNNNRPSGVPDRFSGSKSG
TSASLAITGLQAEDEADYYCQSYDSRLSGWVFGGGTKLTVLG
SEQ ID NO: 587
14057_LC [hu anti-<huCDH19> 4A9 (1-239)(F47L) VL]
QSVLTQPPSVSGAPGQRVTISCTGSSSNIGTGYAVHWYQQLPGTAPKLLIYGNNNRPSGVPDRFSGSKSG
TSASLAITGLQAEDEADYYCQSYDSRLSGWVFGGGTKLTVLG
SEQ ID NO: 588
14058_LC [hu anti-<huCDH19> 4A9 (1-239)(F47L, D110E) VL]
QSVLTQPPSVSGAPGQRVTISCTGSSSNIGTGYAVHWYQQLPGTAPKLLIYGNNNRPSGVPDRFSGSKSG
TSASLAITGLQAEDEADYYCQSYESRLSGWVFGGGTKLTVLG
SEQ ID NO: 589
14059_LC [hu anti-<huCDH19> 4A9 (1-239)(F47L, D110E) VL]
QSVLTQPPSVSGAPGQRVTISCTGSSSNIGTGYAVHWYQQLPGTAPKLLIYGNNNRPSGVPDRFSGSKSG
TSASLAITGLQAEDEADYYCQSYESRLSGWVFGGGTKLTVLG
SEQ ID NO: 590
14060_LC [hu anti-<huCDH19> 20D3.1 (1-235)(S102A) VL]
QSALTQPPSATGTPGQRVTISCSGSSSNIGSNFVNWYKQLPGTAPKVLIYTNNQRPSGVPDRFSGSKSGTS
ASLAISGLQSEDEADYYCATWDDSLNGWVFGGGTKLTVLG
SEQ ID NO: 591
14061_LC [hu anti-<huCDH19> 20D3.1 (1-235)(K45Q, S102A) VL]
QSALTQPPSATGTPGQRVTISCSGSSSNIGSNFVNWYQQLPGTAPKVLIYTNNQRPSGVPDRFSGSKSGTS
ASLAISGLQSEDEADYYCATWDDSLNGWVFGGGTKLTVLG
SEQ ID NO: 592
14062_LC [hu anti-<huCDH19> 20D3.1 (1-235)(K45Q, S102A) VL]
QSALTQPPSATGTPGQRVTISCSGSSSNIGSNFVNWYQQLPGTAPKVLIYTNNQRPSGVPDRFSGSKSGTS
ASLAISGLQSEDEADYYCATWDDSLNGWVFGGGTKLTVLG
SEQ ID NO: 593
14063_LC [hu anti-<huCDH19> 20D3.1 (1-235)(K45Q, S102A, D111E, N135Q) VL]
QSALTQPPSATGTPGQRVTISCSGSSSNIGSNFVNWYQQLPGTAPKVLIYTNNQRPSGVPDRFSGSKSGTS
ASLAISGLQSEDEADYYCATWDESLQGWVFGGGTKLTVLG
SEQ ID NO: 594
14064_LC [hu anti-<huCDH19> 20D3.1 (1-235)(W109Y) VL]
QSALTQPPSATGTPGQRVTISCSGSSSNIGSNFVNWYKQLPGTAPKVLIYTNNQRPSGVPDRFSGSKSGTS
ASLAISGLQSEDESDYYCATYDDSLNGWVFGGGTKLTVLG
SEQ ID NO: 595
14065_LC [hu anti-<huCDH19> 22G10.1 VL]
EIVMTQSPVTLSLSLGERATLSCRASQSISSNLAWFQQKPGQAPRLLIYGAFTRATGIPARVSGSGSGTEF
TLTISSLQSEDFAVYYCQQYNYWPLTFGGGTKVEIKR
SEQ ID NO: 596
14066_LC [hu anti-<huCDH19> 22G10.1 VL]
EIVMTQSPVTLSLSLGERATLSCRASQSISSNLAWFQQKPGQAPRLLIYGAFTRATGIPARVSGSGSGTEF
TLTISSLQSEDFAVYYCQQYNYWPLTFGGGTKVEIKR
SEQ ID NO: 597
14067_LC [hu anti-<huCDH19> 22G10.1 (1-234)(Q97E, S98P) VL]
EIVMTQSPVTLSLSLGERATLSCRASQSISSNLAWFQQKPGQAPRLLIYGAFTRATGIPARVSGSGSGTEF
TLTISSLEPEDFAVYYCQQYNYWPLTFGGGTKVEIKR
SEQ ID NO: 598
14068_LC [hu anti-<huCDH19> 22G10.1 (1-234)(V78F, Q97E, S98P) VL]
EIVMTQSPVTLSLSLGERATLSCRASQSISSNLAWFQQKPGQAPRLLIYGAFTRATGIPARFSGSGSGTEF
TLTISSLEPEDFAVYYCQQYNYWPLTFGGGTKVEIKR
SEQ ID NO: 599
14069_LC [hu anti-<huCDH19> 22G10.1 (1-234)(V78F, Q97E, S98P) VL]
EIVMTQSPVTLSLSLGERATLSCRASQSISSNLAWFQQKPGQAPRLLIYGAFTRATGIPARFSGSGSGTEF
TLTISSLEPEDFAVYYCQQYNYWPLTFGGGTKVEIKR
SEQ ID NO: 600
14070_LC [hu anti-<huCDH19> 22G10.1 VL]
EIVMTQSPVTLSLSLGERATLSCRASQSISSNLAWFQQKPGQAPRLLIYGAFTRATGIPARVSGSGSGTEF
TLTISSLQSEDFAVYYCQQYNYWPLTFGGGTKVEIKR
SEQ ID NO: 601
14071_LC [hu anti-<huCDH19> 16A4.1 (1-235)(G1410) VL]
EIVLTQSPGTLSLSPGERATLSCRASQSVSSSYLAWYQQKPGQAPRLLIYGTSSRATGIPDRFSGSGSGTD
FTLTISRLEPEDFAVYYCQQYGSSPFTFGQGTKVEIKR
SEQ ID NO: 602
14072_LC [hu anti-<huCDH19> 19B5.1 (1-235)(K45Q, S102A) VL]
QSALTQPPSTTGTPGQRVTISCSGSRSNIGSNFVNWYQQLPGTAPKVLIYTNNQRPSGVPDRFSGSKSGTS
ASLAISGLQSEDEADYYCATWDDSMNGWVFGGGTKLTVLG
SEQ ID NO: 603
14073_LC [hu anti-<huCDH19> 19B5.1 (1-235)(K45Q, S102A) VL]
QSALTQPPSTTGTPGQRVTISCSGSRSNIGSNFVNWYQQLPGTAPKVLIYTNNQRPSGVPDRFSGSKSGTS
ASLAISGLQSEDEADYYCATWDDSMNGWVFGGGTKLTVLG
SEQ ID NO: 604
14074_LC [hu anti-<huCDH19> 19B5.1 (1-235)(T11V, K45Q, S102A) VL]
QSALTQPPSVTGTPGQRVTISCSGSRSNIGSNFVNWYQQLPGTAPKVLIYTNNQRPSGVPDRFSGSKSGT
SASLAISGLQSEDEADYYCATWDDSMNGWVFGGGTKLTVLG
SEQ ID NO: 605
14075_LC [hu anti-<huCDH19> 19B5.1 (1-235)(T11V, K45Q, S102A, D111E, N135Q)
VL]
QSALTQPPSVTGTPGQRVTISCSGSRSNIGSNFVNWYQQLPGTAPKVLIYTNNQRPSGVPDRFSGSKSGT
SASLAISGLQSEDEADYYCATWDESMQGWVFGGGTKLTVLG
SEQ ID NO: 606
14076_LC [hu anti-<huCDH19> 19B5.1 (1-235)(T11V, K45Q, S102A, W109Y, D111E,
N135Q) VL]
QSALTQPPSVTGTPGQRVTISCSGSRSNIGSNFVNWYQQLPGTAPKVLIYTNNQRPSGVPDRFSGSKSGT
SASLAISGLQSEDEADYYCATYDESMQGWVFGGGTKLTVLG
SEQ ID NO: 607
14077_LC [hu anti-<huCDH19> 23A10.3 (1-231)(C42S) VL]
SYELTQPPSVSVSPGQTASITCSGDRLGEKYVSWYQQKPGQSPILVIYQDNKWPSGIPERFSGSNSGNTA
TLTISGTQAMDEADYYCQAWDSSTVVFGGGTKLTVLG
SEQ ID NO: 608
14078_LC [hu anti-<huCDH19> 23A10.3 (1-231)(C42S) VL]
SYELTQPPSVSVSPGQTASITCSGDRLGEKYVSWYQQKPGQSPILVIYQDNKWPSGIPERFSGSNSGNTA
TLTISGTQAMDEADYYCQAWDSSTVVFGGGTKLTVLG
SEQ ID NO: 609
14079_LC [hu anti-<huCDH19> 23A10.3 (1-231)(C42S, D110E) VL]
SYELTQPPSVSVSPGQTASITCSGDRLGEKYVSWYQQKPGQSPILVIYQDNKWPSGIPERFSGSNSGNTA
TLTISGTQAMDEADYYCQAWESSTVVFGGGTKLTVLG
SEQ ID NO: 610
14080_LC [hu anti-<huCDH19> 23A10.3 (1-231)(C42Y) VL]
SYELTQPPSVSVSPGQTASITCSGDRLGEKYVYWYQQKPGQSPILVIYQDNKWPSGIPERFSGSNSGNTA
TLTISGTQAMDEADYYCQAWDSSTVVFGGGTKLTVLG
SEQ ID NO: 611
14081_LC [hu anti-<huCDH19> 25G10.1 (1-235)(H105Y) VL]
EIVLTQSPGTLSLSPGERATLSCRASQSVSSSYLAWYQQKPGQAPRLLIFGASSRATGIPDRFSGSGSGTD
FTLTISRLEPEDFAVYYCQQYGNSPLTFGGGTKVEIKR
SEQ ID NO: 612
14082_LC [hu anti-<huCDH19> 25G10.1 (1-235)(H105Y) VL]
EIVLTQSPGTLSLSPGERATLSCRASQSVSSSYLAWYQQKPGQAPRLLIFGASSRATGIPDRFSGSGSGTD
FTLTISRLEPEDFAVYYCQQYGNSPLTFGGGTKVEIKR
SEQ ID NO: 613
14083_LC [hu anti-<huCDH19> 26D1.1 (1-235)(S7P) VL]
HSVLTQPPSASGTPGQRVTISCSGSRSNIGSNFVNWYQQLPGTAPKLLIYTNNQRPSGVPDRFSGSKSGTS
ASLAISGLQSEDEADYYCAVWDDSLNGWVFGGGTKLTVLG
SEQ ID NO: 614
14084_LC [hu anti-<huCDH19> 26D1.1 (1-235)(H1Q, S7P) VL]
QSVLTQPPSASGTPGQRVTISCSGSRSNIGSNFVNWYQQLPGTAPKLLIYTNNQRPSGVPDRFSGSKSGTS
ASLAISGLQSEDEADYYCAVWDDSLNGWVFGGGTKLTVLG
SEQ ID NO: 615
14085_LC [hu anti-<huCDH19> 26D1.1 (1-235)(H1Q, S7P, W109Y) VL]
QSVLTQPPSASGTPGQRVTISCSGSRSNIGSNFVNWYQQLPGTAPKLLIYTNNQRPSGVPDRFSGSKSGTS
ASLAISGLQSEDEADYYCAVYDDSLNGWVFGGGTKLTVLG
SEQ ID NO: 616
14086_LC [hu anti-<huCDH19> 26D1.1 (1-235)(H1Q, S7P, W109Y, D111E, N135Q) VL]
QSVLTQPPSASGTPGQRVTISCSGSRSNIGSNFVNWYQQLPGTAPKLLIYTNNQRPSGVPDRFSGSKSGTS
ASLAISGLQSEDEADYYCAVYDESLQGWVFGGGTKLTVLG
SEQ ID NO: 617
14087_LC [hu anti-<huCDH19> 26D1.1 (1-235)(H1Q, S7P, W109Y, D111E ,N135Q) VL]
QSVLTQPPSASGTPGQRVTISCSGSRSNIGSNFVNWYQQLPGTAPKLLIYTNNQRPSGVPDRFSGSKSGTS
ASLAISGLQSEDEADYYCAVYDESLQGWVFGGGTKLTVLG
SEQ ID NO: 618
14088_LC [hu anti-<huCDH19> 26D1.1 (1-235)(H1Q, S7P) VL]
QSVLTQPPSASGTPGQRVTISCSGSRSNIGSNFVNWYQQLPGTAPKLLIYTNNQRPSGVPDRFSGSKSGTS
ASLAISGLQSEDEADYYCAVWDDSLNGWVFGGGTKLTVLG
SEQ ID NO: 619
14089_LC [hu anti-<huCDH19> 26F12.1 (1-235)(S7P) VL]
QSVLTQPPSASGTPGQKVTISCSGSRSNIGSNFVNWYQQLPGTAPKLLIYTNYQRPSGVPDRFSGSKSGTS
ASLAISGLQSEDEADYYCAVWDDSLNGWVFGGGTKLTVLG
SEQ ID NO: 620
14090_LC [hu anti-<huCDH19> 26F12.1 (1-235)(S7P, D111E) VL]
QSVLTQPPSASGTPGQKVTISCSGSRSNIGSNFVNWYQQLPGTAPKLLIYTNYQRPSGVPDRFSGSKSGTS
ASLAISGLQSEDEADYYCAVWDESLNGWVFGGGTKLTVLG
SEQ ID NO: 621
14091_LC [hu anti-<huCDH19> 26F12.1 (1-235)(S7P, D111E) VL]
QSVLTQPPSASGTPGQKVTISCSGSRSNIGSNFVNWYQQLPGTAPKLLIYTNYQRPSGVPDRFSGSKSGTS
ASLAISGLQSEDEADYYCAVWDESLNGWVFGGGTKLTVLG
SEQ ID NO: 622
14092_LC [hu anti-<huCDH19> 26F12.1 (1-235)(S7P, W109Y, D111E, N135Q) VL]
QSVLTQPPSASGTPGQKVTISCSGSRSNIGSNFVNWYQQLPGTAPKLLIYTNYQRPSGVPDRFSGSKSGTS
ASLAISGLQSEDEADYYCAVYDESLQGWVFGGGTKLTVLG
SEQ ID NO: 623
14093_LC [hu anti-<huCDH19> 25F8.1 (1-235)(K45Q) VL]
QSALTQPPSATGTPGQRVTISCSGSSSNIGRNFVNWYQQLPGTAPKVLIYTNNQRPSGVPDRFSGSKSGT
SASLAISGLQSEDESDYYCAAWDDSLNGWVFGGGTKLTVLG
SEQ ID NO: 624
14094_LC [hu anti-<huCDH19> 25F8.1 (1-235)(K45Q, S102A) VL]
QSALTQPPSATGTPGQRVTISCSGSSSNIGRNFVNWYQQLPGTAPKVLIYTNNQRPSGVPDRFSGSKSGT
SASLAISGLQSEDEADYYCAAWDDSLNGWVFGGGTKLTVLG
SEQ ID NO: 625
14095_LC [hu anti-<huCDH19> 25F8.1 (1-235)(K45Q, S102A) VL]
QSALTQPPSATGTPGQRVTISCSGSSSNIGRNFVNWYQQLPGTAPKVLIYTNNQRPSGVPDRFSGSKSGT
SASLAISGLQSEDEADYYCAAWDDSLNGWVFGGGTKLTVLG
SEQ ID NO: 626
14096_LC [hu anti-<huCDH19> 25F8.1 (1-235)(K45Q, S102A, D111E) VL]
QSALTQPPSATGTPGQRVTISCSGSSSNIGRNFVNWYQQLPGTAPKVLIYTNNQRPSGVPDRFSGSKSGT
SASLAISGLQSEDEADYYCAAWDESLNGWVFGGGTKLTVLG
SEQ ID NO: 627
14097_LC [hu anti-<huCDH19> 25F8.1 (1-235)(K45Q, S102A, D111E, N135Q) VL]
QSALTQPPSATGTPGQRVTISCSGSSSNIGRNFVNWYQQLPGTAPKVLIYTNNQRPSGVPDRFSGSKSGT
SASLAISGLQSEDEADYYCAAWDESLQGWVFGGGTKLTVLG
SEQ ID NO: 628
14098_LC [hu anti-<huCDH19> 22D1.1 (1-235)(K45Q, S102A) VL]
QSALTQPPSATGTPGQRVTISCSGSSSNIGSNFVNWYQQLPGTAPKVLIYTNNQRPSGVPDRFSGSKSGTS
ASLAISGLQSEDEADYYCATWDDSMNGWVFGGGTKLTVLG
SEQ ID NO: 629
14099_LC [hu anti-<huCDH19> 22D1.1 (1-235)(K45Q, S102A, D111E, N135Q) VL]
QSALTQPPSATGTPGQRVTISCSGSSSNIGSNFVNWYQQLPGTAPKVLIYTNNQRPSGVPDRFSGSKSGTS
ASLAISGLQSEDEADYYCATWDESMQGWVFGGGTKLTVLG
SEQ ID NO: 630
14100_LC [hu anti-<huCDH19> 22D1.1 (1-235)(K45Q, S102A, W109Y, D111E, N135Q)
VL]
QSALTQPPSATGTPGQRVTISCSGSSSNIGSNFVNWYQQLPGTAPKVLIYTNNQRPSGVPDRFSGSKSGTS
ASLAISGLQSEDEADYYCATYDESMQGWVFGGGTKLTVLG
SEQ ID NO: 631
14101_LC [hu anti-<huCDH19> 22D1.1 (1-235)(K45Q, S102A, W109Y) VL]
QSALTQPPSATGTPGQRVTISCSGSSSNIGSNFVNWYQQLPGTAPKVLIYTNNQRPSGVPDRFSGSKSGTS
ASLAISGLQSEDEADYYCATYDDSMNGWVFGGGTKLTVLG
SEQ ID NO: 632
14102_LC [hu anti-<huCDH19> 22D1.1 (1-235)(K45Q, S102A) VL]
QSALTQPPSATGTPGQRVTISCSGSSSNIGSNFVNWYQQLPGTAPKVLIYTNNQRPSGVPDRFSGSKSGTS
ASLAISGLQSEDEADYYCATWDDSMNGWVFGGGTKLTVLG
SEQ ID NO: 633
13591_LC [hu anti-<huCDH19> 4F7 VL]
QSVLTQPPSVSGAPGQRVTISCTGSSSNIGTGYDVHWYQQLPGTAPKLLIHGNSNRPSGVPDRFSGSKSG
TSASLAITGLQAEDEADYYCQSYDSSLSGWVFGGGTRLTVLG
SEQ ID NO: 634
14301_LC [hu anti-<huCDH19> 2G6 (1-234)(D110E) VL]
SYELTQPPSVSVSPGQTASITCSGDRLGEKYTCWYQQRPGQSPLLVIYQDTKRPSGIPERFSGSNSGNTAT
LTISGTQAMDEADYYCQAWESSTVVFGGGTKLTVLG
SEQ ID NO: 635
14302_LC [hu anti-<huCDH19> 2G6 (1-234)(C42S, D110E) VL]
SYELTQPPSVSVSPGQTASITCSGDRLGEKYTSWYQQRPGQSPLLVIYQDTKRPSGIPERFSGSNSGNTAT
LTISGTQAMDEADYYCQAWESSTVVFGGGTKLTVLG
SEQ ID NO: 636
14303_LC [hu anti-<huCDH19> 2G6 (1-234)(C42S, D110E) VL]
SYELTQPPSVSVSPGQTASITCSGDRLGEKYTSWYQQRPGQSPLLVIYQDTKRPSGIPERFSGSNSGNTAT
LTISGTQAMDEADYYCQAWESSTVVFGGGTKLTVLG
SEQ ID NO: 637
14304_LC [hu anti-<huCDH19> 23A10.3 (1-231)(C42S) VL]
SYELTQPPSVSVSPGQTASITCSGDRLGEKYVSWYQQKPGQSPILVIYQDNKWPSGIPERFSGSNSGNTA
TLTISGTQAMDEADYYCQAWDSSTVVFGGGTKLTVLG
SEQ ID NO: 638

[0493] Anti-CDH19 Variable and Constant Region Polynucleotide and Amino Acid Sequences

TABLE IIIa
Heavy Chain Variable and Contant Region Polynucleotide and Amino acid
Sequences

2G6
CAGGTGCAGTTGGTGGAGTCTGGGGGAGGCGTGGTCCAGCCTGGGAGGTCCCTGAGACTCTCCTGT
GCAGCGTCTGGATTCACCTTCAGTAGCTATGGCATGCACTGGGTCCGCCAGGCTCCAGGCAAGGGG
CTGGAGTGGGTGGCATTTATATGGTATGATGGAAGTAATAAATACTATGCAGACTCCGTGAAGGAC
CGATTCACCATCTCCAGAGACAATTCCAAGAACACGCTGTATCTGCAAATGAAAAGCCTGAGAGCT
GAGGACACGGCTGTGTATTACTGTGCGAGAAGGGCCGGTATAATAGGAACTATAGGCTACTACTAC
GGTATGGACGTCTGGGGCCAAGGGACCACGGTCACCGTCTCTAGTGCCTCCACCAAGGGCCCATCG
GTCTTCCCCCTGGCACCCTCCTCCAAGAGCACCTCTGGGGGCACAGCGGCCCTGGGCTGCCTGGTC
AAGGACTACTTCCCCGAACCGGTGACGGTGTCGTGGAACTCAGGCGCCCTGACCAGCGGCGTGCAC
ACCTTCCCGGCTGTCCTACAGTCCTCAGGACTCTACTCCCTCAGCAGCGTGGTGACCGTGCCCTCCA
GCAGCTTGGGCACCCAGACCTACATCTGCAACGTGAATCACAAGCCCAGCAACACCAAGGTGGAC
AAGAAAGTTGAGCCCAAATCTTGTGACAAAACTCACACATGCCCACCGTGCCCAGCACCTGAACTC
CTGGGGGGACCGTCAGTCTTCCTCTTCCCCCCAAAACCCAAGGACACCCTCATGATCTCCCGGACC
CCTGAGGTCACATGCGTGGTGGTGGACGTGAGCCACGAAGACCCTGAGGTCAAGTTCAACTGGTAC
GTGGACGGCGTGGAGGTGCATAATGCCAAGACAAAGCCGCGGGAGGAGCAGTACAACAGCACGT
ACCGTGTGGTCAGCGTCCTCACCGTCCTGCACCAGGACTGGCTGAATGGCAAGGAGTACAAGTGCA
AGGTCTCCAACAAAGCCCTCCCAGCCCCCATCGAGAAAACCATCTCCAAAGCCAAAGGGCAGCCC
CGAGAACCACAGGTGTACACCCTGCCCCCATCCCGGGAGGAGATGACCAAGAACCAGGTCAGCCT
GACCTGCCTGGTCAAAGGCTTCTATCCCAGCGACATCGCCGTGGAGTGGGAGAGCAATGGGCAGC
CGGAGAACAACTACAAGACCACGCCTCCCGTGCTGGACTCCGACGGCTCCTTCTTCCTCTATAGCA
AGCTCACCGTGGACAAGAGCAGGTGGCAGCAGGGGAACGTCTTCTCATGCTCCGTGATGCATGAG
GCTCTGCACAACCACTACACGCAGAAGAGCCTCTCCCTGTCTCCGGGTAAATGA
SEQ ID NO: 639
QVQLVESGGGVVQPGRSLRLSCAASGFTFSSYGMHWVRQAPGKGLEWVAFIWYDGSNKYYADSVKD
RFTISRDNSKNTLYLQMKSLRAEDTAVYYCARRAGIIGTIGYYYGMDVWGQGTTVTVSSASTKGPSVFP
LAPSSKSTSGGTAALGCLVKDYFPEPVTVSWNSGALTSGVHTFPAVLQSSGLYSLSSVVTVPSSSLGTQT
YICNVNHKPSNTKVDKKVEPKSCDKTHTCPPCPAPELLGGPSVFLFPPKPKDTLMISRTPEVTCVVVDVS
HEDPEVKFNWYVDGVEVHNAKTKPREEQYNSTYRVVSVLTVLHQDWLNGKEYKCKVSNKALPAPIE
KTISKAKGQPREPQVYTLPPSREEMTKNQVSLTCLVKGFYPSDIAVEWESNGQPENNYKTTPPVLDSDG
SFFLYSKLTVDKSRWQQGNVFSCSVMHEALHNHYTQKSLSLSPGK
SEQ ID NO: 640
4A2
CAGGTGCAGCTGCAGGAGTCGGGCCCAGGACTGGTGAAGCCTTCACAGACCCTGTCCCTCACCTGC
ACTGTCTCTGGTGGCTCCATCAGCAGTAGTGGTTACTACTGGAGCTGGATCCGCCAGCACCCAGGG
AAGGGCCTGGAGTGGATTGGGTACATCTATTACACTGGGAGCGCCTACTACAACCCGTCCCTCAAG
AGTCGAGTTACCATATCAGTAGACACGTCTAAGAACCAGTTCTCCCTGAAGCTGAGCTCTGTGACT
GCCGCGGACACGGCCGTGTATTACTGTGCGAGAGATGGAAGCAGTGGCTGGTACTTCCAGTATTGG
GGCCAGGGCACCCTGGTCACCGTCTCTAGTGCCTCCACCAAGGGCCCATCGGTCTTCCCCCTGGCA
CCCTCCTCCAAGAGCACCTCTGGGGGCACAGCGGCCCTGGGCTGCCTGGTCAAGGACTACTTCCCC
GAACCGGTGACGGTGTCGTGGAACTCAGGCGCCCTGACCAGCGGCGTGCACACCTTCCCGGCTGTC
CTACAGTCCTCAGGACTCTACTCCCTCAGCAGCGTGGTGACCGTGCCCTCCAGCAGCTTGGGCACC
CAGACCTACATCTGCAACGTGAATCACAAGCCCAGCAACACCAAGGTGGACAAGAAAGTTGAGCC
CAAATCTTGTGACAAAACTCACACATGCCCACCGTGCCCAGCACCTGAACTCCTGGGGGGACCGTC
AGTCTTCCTCTTCCCCCCAAAACCCAAGGACACCCTCATGATCTCCCGGACCCCTGAGGTCACATGC
GTGGTGGTGGACGTGAGCCACGAAGACCCTGAGGTCAAGTTCAACTGGTACGTGGACGGCGTGGA
GGTGCATAATGCCAAGACAAAGCCGCGGGAGGAGCAGTACAACAGCACGTACCGTGTGGTCAGCG
TCCTCACCGTCCTGCACCAGGACTGGCTGAATGGCAAGGAGTACAAGTGCAAGGTCTCCAACAAA
GCCCTCCCAGCCCCCATCGAGAAAACCATCTCCAAAGCCAAAGGGCAGCCCCGAGAACCACAGGT
GTACACCCTGCCCCCATCCCGGGAGGAGATGACCAAGAACCAGGTCAGCCTGACCTGCCTGGTCAA
AGGCTTCTATCCCAGCGACATCGCCGTGGAGTGGGAGAGCAATGGGCAGCCGGAGAACAACTACA
AGACCACGCCTCCCGTGCTGGACTCCGACGGCTCCTTCTTCCTCTATAGCAAGCTCACCGTGGACA
AGAGCAGGTGGCAGCAGGGGAACGTCTTCTCATGCTCCGTGATGCATGAGGCTCTGCACAACCACT
ACACGCAGAAGAGCCTCTCCCTGTCTCCGGGTAAATGA
SEQ ID NO: 641
QVQLQESGPGLVKPSQTLSLTCTVSGGSISSSGYYWSWIRQHPGKGLEWIGYIYYTGSAYYNPSLKSRV
TISVDTSKNQFSLKLSSVTAADTAVYYCARDGSSGWYFQYWGQGTLVTVSSASTKGPSVFPLAPSSKST
SGGTAALGCLVKDYFPEPVTVSWNSGALTSGVHTFPAVLQSSGLYSLSSVVTVPSSSLGTQTYICNVNH
KPSNTKVDKKVEPKSCDKTHTCPPCPAPELLGGPSVFLFPPKPKDTLMISRTPEVTCVVVDVSHEDPEVK
FNWYVDGVEVHNAKTKPREEQYNSTYRVVSVLTVLHQDWLNGKEYKCKVSNKALPAPIEKTISKAKG
QPREPQVYTLPPSREEMTKNQVSLTCLVKGFYPSDIAVEWESNGQPENNYKTTPPVLDSDGSFFLYSKL
TVDKSRWQQGNVFSCSVMHEALHNHYTQKSLSLSPGK
SEQ ID NO: 642
4A9
CAGGTGCAGCTGCAGGAGTCGGGCCCAGGACTGGTGAAGCCTTCGGAGACCCTGTCCCTCACCTGC
ACTGTCTCTGGTGGCTCCATCAGTGGTTACTACTGGAGCTGGATCCGGCAGCCCCCAGGAAAGGGA
CTGGAGTGGTTTGCATATTTCTCTTACAGTGGGAGCACCAACTACAACCCCTCCCTCAAGAGTCGA
GTCACCTTATCAGTAGACACGTCCAAGAACCAGTTCTCCCTGAAGCTGAGCTCTGTGACCGCTGCG
GACACGGCCGTGTATTACTGTGCGAGGAACTGGGCCTTCCACTTTGACTTCTGGGGCCAGGGAACC
CTGGTCACCGTCTCTAGTGCCTCCACCAAGGGCCCATCGGTCTTCCCCCTGGCACCCTCCTCCAAGA
GCACCTCTGGGGGCACAGCGGCCCTGGGCTGCCTGGTCAAGGACTACTTCCCCGAACCGGTGACGG
TGTCGTGGAACTCAGGCGCCCTGACCAGCGGCGTGCACACCTTCCCGGCTGTCCTACAGTCCTCAG
GACTCTACTCCCTCAGCAGCGTGGTGACCGTGCCCTCCAGCAGCTTGGGCACCCAGACCTACATCT
GCAACGTGAATCACAAGCCCAGCAACACCAAGGTGGACAAGAAAGTTGAGCCCAAATCTTGTGAC
AAAACTCACACATGCCCACCGTGCCCAGCACCTGAACTCCTGGGGGGACCGTCAGTCTTCCTCTTC
CCCCCAAAACCCAAGGACACCCTCATGATCTCCCGGACCCCTGAGGTCACATGCGTGGTGGTGGAC
GTGAGCCACGAAGACCCTGAGGTCAAGTTCAACTGGTACGTGGACGGCGTGGAGGTGCATAATGC
CAAGACAAAGCCGCGGGAGGAGCAGTACAACAGCACGTACCGTGTGGTCAGCGTCCTCACCGTCC
TGCACCAGGACTGGCTGAATGGCAAGGAGTACAAGTGCAAGGTCTCCAACAAAGCCCTCCCAGCC
CCCATCGAGAAAACCATCTCCAAAGCCAAAGGGCAGCCCCGAGAACCACAGGTGTACACCCTGCC
CCCATCCCGGGAGGAGATGACCAAGAACCAGGTCAGCCTGACCTGCCTGGTCAAAGGCTTCTATCC
CAGCGACATCGCCGTGGAGTGGGAGAGCAATGGGCAGCCGGAGAACAACTACAAGACCACGCCTC
CCGTGCTGGACTCCGACGGCTCCTTCTTCCTCTATAGCAAGCTCACCGTGGACAAGAGCAGGTGGC
AGCAGGGGAACGTCTTCTCATGCTCCGTGATGCATGAGGCTCTGCACAACCACTACACGCAGAAGA
GCCTCTCCCTGTCTCCGGGTAAATGA
SEQ ID NO: 643
QVQLQESGPGLVKPSETLSLTCTVSGGSISGYYWSWIRQPPGKGLEWFAYFSYSGSTNYNPSLKSRVTLS
VDTSKNQFSLKLSSVTAADTAVYYCARNWAFHFDFWGQGTLVTVSSASTKGPSVFPLAPSSKSTSGGT
AALGCLVKDYFPEPVTVSWNSGALTSGVHTFPAVLQSSGLYSLSSVVTVPSSSLGTQTYICNVNHKPSN
TKVDKKVEPKSCDKTHTCPPCPAPELLGGPSVFLFPPKPKDTLMISRTPEVTCVVVDVSHEDPEVKFNW
YVDGVEVHNAKTKPREEQYNSTYRVVSVLTVLHQDWLNGKEYKCKVSNKALPAPIEKTISKAKGQPR
EPQVYTLPPSREEMTKNQVSLTCLVKGFYPSDIAVEWESNGQPENNYKTTPPVLDSDGSFFLYSKLTVD
KSRWQQGNVFSCSVMHEALHNHYTQKSLSLSPGK
SEQ ID NO: 644
4B10
CAGGTGCAGCTGGTGGAGTCTGGGGGAGGCGTGGTCCAGCCTGGGAGGTCCCTGAGACTCTCCTGT
GCAGCCTCTGGATTCACCTTCAGTAGCTATGACATGCACTGGGTCCGCCAGGCTCCAGGCAAGGGG
CTGGAGTGGGTGGCAGTTATATCATATGATGGAACTAATGAATACTATGCAGACTCCGTGAAGGGC
CGATTCACCATCTCCAGAGACACTTCCAAGAACACGCTGTATTTGCAAATGAACAGCCTGAGAGCT
GAGGACACGGCTGTATATTACTGTGCGAGAGAACGATATTTTGACTGGTCTTTTGACTACTGGGGC
CAGGGAACCCTGGTCAGCGTCTCTAGTGCCTCCACCAAGGGCCCATCGGTCTTCCCCCTGGCACCC
TCCTCCAAGAGCACCTCTGGGGGCACAGCGGCCCTGGGCTGCCTGGTCAAGGACTACTTCCCCGAA
CCGGTGACGGTGTCGTGGAACTCAGGCGCCCTGACCAGCGGCGTGCACACCTTCCCGGCTGTCCTA
CAGTCCTCAGGACTCTACTCCCTCAGCAGCGTGGTGACCGTGCCCTCCAGCAGCTTGGGCACCCAG
ACCTACATCTGCAACGTGAATCACAAGCCCAGCAACACCAAGGTGGACAAGAAAGTTGAGCCCAA
ATCTTGTGACAAAACTCACACATGCCCACCGTGCCCAGCACCTGAACTCCTGGGGGGACCGTCAGT
CTTCCTCTTCCCCCCAAAACCCAAGGACACCCTCATGATCTCCCGGACCCCTGAGGTCACATGCGTG
GTGGTGGACGTGAGCCACGAAGACCCTGAGGTCAAGTTCAACTGGTACGTGGACGGCGTGGAGGT
GCATAATGCCAAGACAAAGCCGCGGGAGGAGCAGTACAACAGCACGTACCGTGTGGTCAGCGTCC
TCACCGTCCTGCACCAGGACTGGCTGAATGGCAAGGAGTACAAGTGCAAGGTCTCCAACAAAGCC
CTCCCAGCCCCCATCGAGAAAACCATCTCCAAAGCCAAAGGGCAGCCCCGAGAACCACAGGTGTA
CACCCTGCCCCCATCCCGGGAGGAGATGACCAAGAACCAGGTCAGCCTGACCTGCCTGGTCAAAG
GCTTCTATCCCAGCGACATCGCCGTGGAGTGGGAGAGCAATGGGCAGCCGGAGAACAACTACAAG
ACCACGCCTCCCGTGCTGGACTCCGACGGCTCCTTCTTCCTCTATAGCAAGCTCACCGTGGACAAG
AGCAGGTGGCAGCAGGGGAACGTCTTCTCATGCTCCGTGATGCATGAGGCTCTGCACAACCACTAC
ACGCAGAAGAGCCTCTCCCTGTCTCCGGGTAAATGA
SEQ ID NO: 645
QVQLVESGGGVVQPGRSLRLSCAASGFTFSSYDMHWVRQAPGKGLEWVAVISYDGTNEYYADSVKGR
FTISRDTSKNTLYLQMNSLRAEDTAVYYCARERYFDWSFDYWGQGTLVSVSSASTKGPSVFPLAPSSKS
TSGGTAALGCLVKDYFPEPVTVSWNSGALTSGVHTFPAVLQSSGLYSLSSVVTVPSSSLGTQTYICNVN
HKPSNTKVDKKVEPKSCDKTHTCPPCPAPELLGGPSVFLFPPKPKDTLMISRTPEVTCVVVDVSHEDPEV
KFNWYVDGVEVHNAKTKPREEQYNSTYRVVSVLTVLHQDWLNGKEYKCKVSNKALPAPIEKTISKAK
GQPREPQVYTLPPSREEMTKNQVSLTCLVKGFYPSDIAVEWESNGQPENNYKTTPPVLDSDGSFFLYSK
LTVDKSRWQQGNVFSCSVMHEALHNHYTQKSLSLSPGK
SEQ ID NO: 646
4F3
CAGGTGCAGCTGGTGGAGTCTGGGGGAGGCGTGGTCCAGCCTGGGAGGTCCCTGAGACTCTCCTGT
GCAGCGTCTGGATTCTCCTTCAGTAGCTATGACATGGACTGGGTCCGCCAGACTCCAGGCAAGGGG
CTGGAGTGGGTGGCAGTTATATGGTATGATGGAAGTAATAAATACTATGCAGACTCCGTGAGGGGC
CGATTCACCATCTCCAGAGACAATTCCAAGAACACGCTGTTTCTGCAAATGAACAGCCTGAGAGTC
GAGGACACGGCTGTGTATTACTGTGCGAGAGAAACTGGGGAGGGCTGGTACTTCGATCTCTGGGGC
CGTGGCACCCTGGTCACCGTCTCTAGTGCCTCCACCAAGGGCCCATCGGTCTTCCCCCTGGCACCCT
CCTCCAAGAGCACCTCTGGGGGCACAGCGGCCCTGGGCTGCCTGGTCAAGGACTACTTCCCCGAAC
CGGTGACGGTGTCGTGGAACTCAGGCGCCCTGACCAGCGGCGTGCACACCTTCCCGGCTGTCCTAC
AGTCCTCAGGACTCTACTCCCTCAGCAGCGTGGTGACCGTGCCCTCCAGCAGCTTGGGCACCCAGA
CCTACATCTGCAACGTGAATCACAAGCCCAGCAACACCAAGGTGGACAAGAAAGTTGAGCCCAAA
TCTTGTGACAAAACTCACACATGCCCACCGTGCCCAGCACCTGAACTCCTGGGGGGACCGTCAGTC
TTCCTCTTCCCCCCAAAACCCAAGGACACCCTCATGATCTCCCGGACCCCTGAGGTCACATGCGTG
GTGGTGGACGTGAGCCACGAAGACCCTGAGGTCAAGTTCAACTGGTACGTGGACGGCGTGGAGGT
GCATAATGCCAAGACAAAGCCGCGGGAGGAGCAGTACAACAGCACGTACCGTGTGGTCAGCGTCC
TCACCGTCCTGCACCAGGACTGGCTGAATGGCAAGGAGTACAAGTGCAAGGTCTCCAACAAAGCC
CTCCCAGCCCCCATCGAGAAAACCATCTCCAAAGCCAAAGGGCAGCCCCGAGAACCACAGGTGTA
CACCCTGCCCCCATCCCGGGAGGAGATGACCAAGAACCAGGTCAGCCTGACCTGCCTGGTCAAAG
GCTTCTATCCCAGCGACATCGCCGTGGAGTGGGAGAGCAATGGGCAGCCGGAGAACAACTACAAG
ACCACGCCTCCCGTGCTGGACTCCGACGGCTCCTTCTTCCTCTATAGCAAGCTCACCGTGGACAAG
AGCAGGTGGCAGCAGGGGAACGTCTTCTCATGCTCCGTGATGCATGAGGCTCTGCACAACCACTAC
ACGCAGAAGAGCCTCTCCCTGTCTCCGGGTAAATGA
SEQ ID NO: 647
QVQLVESGGGVVQPGRSLRLSCAASGFSFSSYDMDWVRQTPGKGLEWVAVIWYDGSNKYYADSVRG
RFTISRDNSKNTLFLQMNSLRVEDTAVYYCARETGEGWYFDLWGRGTLVTVSSASTKGPSVFPLAPSSK
STSGGTAALGCLVKDYFPEPVTVSWNSGALTSGVHTFPAVLQSSGLYSLSSVVTVPSSSLGTQTYICNVN
HKPSNTKVDKKVEPKSCDKTHTCPPCPAPELLGGPSVFLFPPKPKDTLMISRTPEVTCVVVDVSHEDPEV
KFNWYVDGVEVHNAKTKPREEQYNSTYRVVSVLTVLHQDWLNGKEYKCKVSNKALPAPIEKTISKAK
GQPREPQVYTLPPSREEMTKNQVSLTCLVKGFYPSDIAVEWESNGQPENNYKTTPPVLDSDGSFFLYSK
LTVDKSRWQQGNVFSCSVMHEALHNHYTQKSLSLSPGK
SEQ ID NO: 648
4F7
CAGGTGCAGCTGCAGGAGTCGGGCCCAGGACTGGTGAAGCCTTCGGAGACCCTGTCCCTCACCTGC
ACTGTCTCTGGTGGCTCCATCAGTAGTTACTCCTGGAGCTGGATCCGGCAGCCCCCAGGGAAGGGA
CTGGAGTGGATTGGGTATATCTATTACAGTGGGAGCACCAACTACAACCCCTCCCTCAAGAGTCGA
GTCACCATATCATTAGACACGTCCAAGAACCAGTTCTCCCTGAAGCTGAGCTCTGTGACCGCTGCG
GACACGGCCGTGTATTACTGTGCGAGGAACTGGGCCTTCCACTTTGACTACTGGGGCCAGGGAACC
CTGGTCACCGTCTCTAGTGCCTCCACCAAGGGCCCATCGGTCTTCCCCCTGGCACCCTCCTCCAAGA
GCACCTCTGGGGGCACAGCGGCCCTGGGCTGCCTGGTCAAGGACTACTTCCCCGAACCGGTGACGG
TGTCGTGGAACTCAGGCGCCCTGACCAGCGGCGTGCACACCTTCCCGGCTGTCCTACAGTCCTCAG
GACTCTACTCCCTCAGCAGCGTGGTGACCGTGCCCTCCAGCAGCTTGGGCACCCAGACCTACATCT
GCAACGTGAATCACAAGCCCAGCAACACCAAGGTGGACAAGAAAGTTGAGCCCAAATCTTGTGAC
AAAACTCACACATGCCCACCGTGCCCAGCACCTGAACTCCTGGGGGGACCGTCAGTCTTCCTCTTC
CCCCCAAAACCCAAGGACACCCTCATGATCTCCCGGACCCCTGAGGTCACATGCGTGGTGGTGGAC
GTGAGCCACGAAGACCCTGAGGTCAAGTTCAACTGGTACGTGGACGGCGTGGAGGTGCATAATGC
CAAGACAAAGCCGCGGGAGGAGCAGTACAACAGCACGTACCGTGTGGTCAGCGTCCTCACCGTCC
TGCACCAGGACTGGCTGAATGGCAAGGAGTACAAGTGCAAGGTCTCCAACAAAGCCCTCCCAGCC
CCCATCGAGAAAACCATCTCCAAAGCCAAAGGGCAGCCCCGAGAACCACAGGTGTACACCCTGCC
CCCATCCCGGGAGGAGATGACCAAGAACCAGGTCAGCCTGACCTGCCTGGTCAAAGGCTTCTATCC
CAGCGACATCGCCGTGGAGTGGGAGAGCAATGGGCAGCCGGAGAACAACTACAAGACCACGCCTC
CCGTGCTGGACTCCGACGGCTCCTTCTTCCTCTATAGCAAGCTCACCGTGGACAAGAGCAGGTGGC
AGCAGGGGAACGTCTTCTCATGCTCCGTGATGCATGAGGCTCTGCACAACCACTACACGCAGAAGA
GCCTCTCCCTGTCTCCGGGTAAATGA
SEQ ID NO: 649
QVQLQESGPGLVKPSETLSLTCTVSGGSISSYSWSWIRQPPGKGLEWIGYIYYSGSTNYNPSLKSRVTISL
DTSKNQFSLKLSSVTAADTAVYYCARNWAFHFDYWGQGTLVTVSSASTKGPSVFPLAPSSKSTSGGTA
ALGCLVKDYFPEPVTVSWNSGALTSGVHTFPAVLQSSGLYSLSSVVTVPSSSLGTQTYICNVNHKPSNT
KVDKKVEPKSCDKTHTCPPCPAPELLGGPSVFLFPPKPKDTLMISRTPEVTCVVVDVSHEDPEVKFNWY
VDGVEVHNAKTKPREEQYNSTYRVVSVLTVLHQDWLNGKEYKCKVSNKALPAPIEKTISKAKGQPREP
QVYTLPPSREEMTKNQVSLTCLVKGFYPSDIAVEWESNGQPENNYKTTPPVLDSDGSFFLYSKLTVDKS
RWQQGNVFSCSVMHEALHNHYTQKSLSLSPGK
SEQ ID NO: 650
16A4
CAGGTGCAGCTGCAGGAGTCGGGCCCAGGACTGGCGAAGCCTTCGGAGACCCTGTCCCTCACCTGC
ACTGTCTCTGGTGACTCCATCACTAGTTACTACTGGAGCTGGATCCGGCAGCCCCCAGGGAAGGGA
CTGGAGTGGATTGGGTATATCTATTACAGCGGGAGCACCAATTACAACCCCTCCCTCAAGAGTCGA
GTCACCATATCAGTAGACACGTCCAAGAACCAGTTCTCCCTGAAGCTGAGTTCTGTGACCGCTGCG
GACACGGCCGTGTATTACTGTGCGAGAGATCAAAGGCGGATAGCAGCAGCTGGTACCCACTTCTAC
GGTATGGACGTCTGGGGCCAAGGGACCACGGTCACTGTCTCCTCAGCTTCCACCAAGGGCCCATCC
GTCTTCCCCCTGGCGCCCTCCTCCAAGAGCACCTCTGGGGGCACAGCGGCCCTGGGCTGCCTGGTC
AAGGACTACTTCCCCGAACCGGTGACGGTGTCGTGGAACTCAGGGGCCCTGACCAGCGGCGTGCA
CACCTTCCCGGCTGTCCTACAGTCCTCAGGACTCTACTCCCTCAGCAGCGTGGTGACCGTGCCCTCC
AGCAGCTTGGGCACCCAGACCTACATCTGCAACGTGAATCACAAGCCCAGCAACACCAAGGTGGA
CAAGAAAGTTGAGCCCAAATCTTGTGACAAAACTCACACATGCCCACCGTGCCCAGCACCTGAACT
CCTGGGGGGACCGTCAGTCTTCCTCTTCCCCCCAAAACCCAAGGACACCCTCATGATCTCCCGGAC
CCCTGAGGTCACATGCGTGGTGGTGGACGTGAGCCACGAAGACCCTGAGGTCAAGTTCAACTGGTA
CGTGGACGGCGTGGAGGTGCATAATGCCAAGACAAAGCCGCGGGAGGAGCAGTACAACAGCACGT
ACCGTGTGGTCAGCGTCCTCACCGTCCTGCACCAGGACTGGCTGAATGGCAAGGAGTACAAGTGCA
AGGTCTCCAACAAAGCCCTCCCAGCCCCCATCGAGAAAACCATCTCCAAAGCCAAAGGGCAGCCC
CGAGAACCACAGGTGTACACCCTGCCCCCATCCCGGGAGGAGATGACCAAGAACCAGGTCAGCCT
GACCTGCCTGGTCAAAGGCTTCTATCCCAGCGACATCGCCGTGGAGTGGGAGAGCAATGGGCAGC
CGGAGAACAACTACAAGACCACGCCTCCCGTGCTGGACTCCGACGGCTCCTTCTTCCTCTATAGCA
AGCTCACCGTGGACAAGAGCAGGTGGCAGCAGGGGAACGTCTTCTCATGCTCCGTGATGCATGAG
GCTCTGCACAACCACTACACGCAGAAGAGCCTCTCCCTGTCTCCGGGTAAATGA
SEQ ID NO: 651
QVQLQESGPGLAKPSETLSLTCTVSGDSITSYYWSWIRQPPGKGLEWIGYIYYSGSTNYNPSLKSRVTISV
DTSKNQFSLKLSSVTAADTAVYYCARDQRRIAAAGTHFYGMDVWGQGTTVTVSSASTKGPSVFPLAPS
SKSTSGGTAALGCLVKDYFPEPVTVSWNSGALTSGVHTFPAVLQSSGLYSLSSVVTVPSSSLGTQTYICN
VNHKPSNTKVDKKVEPKSCDKTHTCPPCPAPELLGGPSVFLFPPKPKDTLMISRTPEVTCVVVDVSHEDP
EVKFNWYVDGVEVHNAKTKPREEQYNSTYRVVSVLTVLHQDWLNGKEYKCKVSNKALPAPIEKTISK
AKGQPREPQVYTLPPSREEMTKNQVSLTCLVKGFYPSDIAVEWESNGQPENNYKTTPPVLDSDGSFFLY
SKLTVDKSRWQQGNVFSCSVMHEALHNHYTQKSLSLSPGK
SEQ ID NO: 652
16C1
CAGGTGCAGCTGCAGGAGTCGGGCCCAGGACTGGTGAAGCCTTCGGAGACCCTGTCCCTCACTTGT
ACTGTCTCTGGTGGCTCCATCAGTGGTTACTACTGGAGCTGGATCCGGCAGCCCCCAGGGAAGGGA
CTGGAGTGGATTGGGTATATCTATTACATTGGGAGCACCAACTACAACCCCTCCCTCAAGAGTCGA
GTCACCATGTCAATAGACACGTCCAAGAACCAGTTCTCCCTGACGCTGAGCTCTTTGACCGCTGCG
GACACGGCCGTGTATTTCTGTGCGAGAGATGGGAGCAGTGGCTGGTACCGGTGGTTCGACCCCTGG
GGCCAGGGAACCCTGGTCACCGTCTCCTCAGCTTCCACCAAGGGCCCATCCGTCTTCCCCCTGGCG
CCCTCCTCCAAGAGCACCTCTGGGGGCACAGCGGCCCTGGGCTGCCTGGTCAAGGACTACTTCCCC
GAACCGGTGACGGTGTCGTGGAACTCAGGGGCCCTGACCAGCGGCGTGCACACCTTCCCGGCTGTC
CTACAGTCCTCAGGACTCTACTCCCTCAGCAGCGTGGTGACCGTGCCCTCCAGCAGCTTGGGCACC
CAGACCTACATCTGCAACGTGAATCACAAGCCCAGCAACACCAAGGTGGACAAGAAAGTTGAGCC
CAAATCTTGTGACAAAACTCACACATGCCCACCGTGCCCAGCACCTGAACTCCTGGGGGGACCGTC
AGTCTTCCTCTTCCCCCCAAAACCCAAGGACACCCTCATGATCTCCCGGACCCCTGAGGTCACATGC
GTGGTGGTGGACGTGAGCCACGAAGACCCTGAGGTCAAGTTCAACTGGTACGTGGACGGCGTGGA
GGTGCATAATGCCAAGACAAAGCCGCGGGAGGAGCAGTACAACAGCACGTACCGTGTGGTCAGCG
TCCTCACCGTCCTGCACCAGGACTGGCTGAATGGCAAGGAGTACAAGTGCAAGGTCTCCAACAAA
GCCCTCCCAGCCCCCATCGAGAAAACCATCTCCAAAGCCAAAGGGCAGCCCCGAGAACCACAGGT
GTACACCCTGCCCCCATCCCGGGAGGAGATGACCAAGAACCAGGTCAGCCTGACCTGCCTGGTCAA
AGGCTTCTATCCCAGCGACATCGCCGTGGAGTGGGAGAGCAATGGGCAGCCGGAGAACAACTACA
AGACCACGCCTCCCGTGCTGGACTCCGACGGCTCCTTCTTCCTCTATAGCAAGCTCACCGTGGACA
AGAGCAGGTGGCAGCAGGGGAACGTCTTCTCATGCTCCGTGATGCATGAGGCTCTGCACAACCACT
ACACGCAGAAGAGCCTCTCCCTGTCTCCGGGTAAATGA
SEQ ID NO: 653
QVQLQESGPGLVKPSETLSLTCTVSGGSISGYYWSWIRQPPGKGLEWIGYIYYIGSTNYNPSLKSRVTMS
IDTSKNQFSLTLSSLTAADTAVYFCARDGSSGWYRWFDPWGQGTLVTVSSASTKGPSVFPLAPSSKSTS
GGTAALGCLVKDYFPEPVTVSWNSGALTSGVHTFPAVLQSSGLYSLSSVVTVPSSSLGTQTYICNVNHK
PSNTKVDKKVEPKSCDKTHTCPPCPAPELLGGPSVFLFPPKPKDTLMISRTPEVTCVVVDVSHEDPEVKF
NWYVDGVEVHNAKTKPREEQYNSTYRVVSVLTVLHQDWLNGKEYKCKVSNKALPAPIEKTISKAKGQ
PREPQVYTLPPSREEMTKNQVSLTCLVKGFYPSDIAVEWESNGQPENNYKTTPPVLDSDGSFFLYSKLT
VDKSRWQQGNVFSCSVMHEALHNHYTQKSLSLSPGK
SEQ ID NO: 654
17H8
CAGGTGCAGCTGCAGGAGTCGGGCCCAGGACTGGTGAAGCCTTCGGAGACCCTGTCCCTCACGTGC
ACTGTCTCTGGTGGCTCCATCAATAGTTACTACTGGAGCTGGATCCGGCAGCCCCCAGGGAAGGGA
CTGGAGTGGATTGGGTATATCTATTACATTGGGAGCACCAACTACAACCCCTCCCTCAAGAGTCGC
GTCACCATATCAGTAGACACGTCCAAGAACCAGTTCTCCCTGAAGCTGAGCTCTGTGACCGCTGCG
GACACGGCCCTGTATTACTGTGCGAGAGATTCCCGGTATAGAAGTGGCTGGTACGATGCTTTTGAT
ATCTGGGGCCAAGGGACAATGGTCACCGTCTCTTCAGCTTCCACCAAGGGCCCATCCGTCTTCCCC
CTGGCGCCCTCCTCCAAGAGCACCTCTGGGGGCACAGCGGCCCTGGGCTGCCTGGTCAAGGACTAC
TTCCCCGAACCGGTGACGGTGTCGTGGAACTCAGGGGCCCTGACCAGCGGCGTGCACACCTTCCCG
GCTGTCCTACAGTCCTCAGGACTCTACTCCCTCAGCAGCGTGGTGACCGTGCCCTCCAGCAGCTTGG
GCACCCAGACCTACATCTGCAACGTGAATCACAAGCCCAGCAACACCAAGGTGGACAAGAAAGTT
GAGCCCAAATCTTGTGACAAAACTCACACATGCCCACCGTGCCCAGCACCTGAACTCCTGGGGGGA
CCGTCAGTCTTCCTCTTCCCCCCAAAACCCAAGGACACCCTCATGATCTCCCGGACCCCTGAGGTCA
CATGCGTGGTGGTGGACGTGAGCCACGAAGACCCTGAGGTCAAGTTCAACTGGTACGTGGACGGC
GTGGAGGTGCATAATGCCAAGACAAAGCCGCGGGAGGAGCAGTACAACAGCACGTACCGTGTGGT
CAGCGTCCTCACCGTCCTGCACCAGGACTGGCTGAATGGCAAGGAGTACAAGTGCAAGGTCTCCAA
CAAAGCCCTCCCAGCCCCCATCGAGAAAACCATCTCCAAAGCCAAAGGGCAGCCCCGAGAACCAC
AGGTGTACACCCTGCCCCCATCCCGGGAGGAGATGACCAAGAACCAGGTCAGCCTGACCTGCCTG
GTCAAAGGCTTCTATCCCAGCGACATCGCCGTGGAGTGGGAGAGCAATGGGCAGCCGGAGAACAA
CTACAAGACCACGCCTCCCGTGCTGGACTCCGACGGCTCCTTCTTCCTCTATAGCAAGCTCACCGTG
GACAAGAGCAGGTGGCAGCAGGGGAACGTCTTCTCATGCTCCGTGATGCATGAGGCTCTGCACAA
CCACTACACGCAGAAGAGCCTCTCCCTGTCTCCGGGTAAATGA
SEQ ID NO: 655
QVQLQESGPGLVKPSETLSLTCTVSGGSINSYYWSWIRQPPGKGLEWIGYIYYIGSTNYNPSLKSRVTISV
DTSKNQFSLKLSSVTAADTALYYCARDSRYRSGWYDAFDIWGQGTMVTVSSASTKGPSVFPLAPSSKS
TSGGTAALGCLVKDYFPEPVTVSWNSGALTSGVHTFPAVLQSSGLYSLSSVVTVPSSSLGTQTYICNVN
HKPSNTKVDKKVEPKSCDKTHTCPPCPAPELLGGPSVFLFPPKPKDTLMISRTPEVTCVVVDVSHEDPEV
KFNWYVDGVEVHNAKTKPREEQYNSTYRVVSVLTVLHQDWLNGKEYKCKVSNKALPAPIEKTISKAK
GQPREPQVYTLPPSREEMTKNQVSLTCLVKGFYPSDIAVEWESNGQPENNYKTTPPVLDSDGSFFLYSK
LTVDKSRWQQGNVFSCSVMHEALHNHYTQKSLSLSPGK
SEQ ID NO: 656
19B5
CAGGTGCAGTTGGTGCAGTCTGGGGCTGAGGTGAAGAAGCCTGGGGCCTCAGTGAAGGTTTCCTGC
AAGGTTTCTGGATACACCTTCACCAGCTACTTTATTCACTGGGTGCGCCAGGCCCCTGGACAAGGG
CTTGAATGGATGGGAATTATCAACCCTATTAGTGTTAGCACAAGCTACGCACAGAAGTTCCAGGGC
AGAGTCACCATGACCAGGGACACGTCCACGAGCACAGTCTTCATGGAGCTGAGCAGCCTGAGATC
TGAGGACACGGCCGTGTATTACTGTGCGCGAGGGGGGATACAGCTATGGTTACATTTGGACTACTG
GGGCCAGGGAACCCTGGTCACCGTCTCCTCAGCTTCCACCAAGGGCCCATCCGTCTTCCCCCTGGC
GCCCTCCTCCAAGAGCACCTCTGGGGGCACAGCGGCCCTGGGCTGCCTGGTCAAGGACTACTTCCC
CGAACCGGTGACGGTGTCGTGGAACTCAGGGGCCCTGACCAGCGGCGTGCACACCTTCCCGGCTGT
CCTACAGTCCTCAGGACTCTACTCCCTCAGCAGCGTGGTGACCGTGCCCTCCAGCAGCTTGGGCAC
CCAGACCTACATCTGCAACGTGAATCACAAGCCCAGCAACACCAAGGTGGACAAGAAAGTTGAGC
CCAAATCTTGTGACAAAACTCACACATGCCCACCGTGCCCAGCACCTGAACTCCTGGGGGGACCGT
CAGTCTTCCTCTTCCCCCCAAAACCCAAGGACACCCTCATGATCTCCCGGACCCCTGAGGTCACATG
CGTGGTGGTGGACGTGAGCCACGAAGACCCTGAGGTCAAGTTCAACTGGTACGTGGACGGCGTGG
AGGTGCATAATGCCAAGACAAAGCCGCGGGAGGAGCAGTACAACAGCACGTACCGTGTGGTCAGC
GTCCTCACCGTCCTGCACCAGGACTGGCTGAATGGCAAGGAGTACAAGTGCAAGGTCTCCAACAA
AGCCCTCCCAGCCCCCATCGAGAAAACCATCTCCAAAGCCAAAGGGCAGCCCCGAGAACCACAGG
TGTACACCCTGCCCCCATCCCGGGAGGAGATGACCAAGAACCAGGTCAGCCTGACCTGCCTGGTCA
AAGGCTTCTATCCCAGCGACATCGCCGTGGAGTGGGAGAGCAATGGGCAGCCGGAGAACAACTAC
AAGACCACGCCTCCCGTGCTGGACTCCGACGGCTCCTTCTTCCTCTATAGCAAGCTCACCGTGGAC
AAGAGCAGGTGGCAGCAGGGGAACGTCTTCTCATGCTCCGTGATGCATGAGGCTCTGCACAACCAC
TACACGCAGAAGAGCCTCTCCCTGTCTCCGGGTAAATGA
SEQ ID NO: 657
QVQLVQSGAEVKKPGASVKVSCKVSGYTFTSYFIHWVRQAPGQGLEWMGIINPISVSTSYAQKFQGRV
TMTRDTSTSTVFMELSSLRSEDTAVYYCARGGIQLWLHLDYWGQGTLVTVSSASTKGPSVFPLAPSSKS
TSGGTAALGCLVKDYFPEPVTVSWNSGALTSGVHTFPAVLQSSGLYSLSSVVTVPSSSLGTQTYICNVN
HKPSNTKVDKKVEPKSCDKTHTCPPCPAPELLGGPSVFLFPPKPKDTLMISRTPEVTCVVVDVSHEDPEV
KFNWYVDGVEVHNAKTKPREEQYNSTYRVVSVLTVLHQDWLNGKEYKCKVSNKALPAPIEKTISKAK
GQPREPQVYTLPPSREEMTKNQVSLTCLVKGFYPSDIAVEWESNGQPENNYKTTPPVLDSDGSFFLYSK
LTVDKSRWQQGNVFSCSVMHEALHNHYTQKSLSLSPGK
SEQ ID NO: 658
20D3
CAGGTGCAGCTGGTGCAGTCTGGGGCTGAGGTGAAGAAGCCTGGGGCCTCAGTGAAGGTTTCCTGC
AAGGTTTCTGGATACACCTTCACCAGCTACTTTATTCACTGGGTGCGCCAGGCCCCTGGACAAGGG
CTTGAGTGGATGGGAATAATCAACCCTATTAGTGTTAGCACAAGCTACGCACAGAAGTTCCAGGGC
AGAGTCACCATGACCAGGGACACGTCCACGAGCACAGTCTTCATGGAGCTGAGCAGCCTGAGATC
TGAGGACACGGCCGTGTATTACTGTGCGCGAGGGGGGATACAGCTATGGTTACATTTTGACTACTG
GGGCCAGGGAACCCTGGTCACCGTCTCCTCAGCTTCCACCAAGGGCCCATCCGTCTTCCCCCTGGC
GCCCTCCTCCAAGAGCACCTCTGGGGGCACAGCGGCCCTGGGCTGCCTGGTCAAGGACTACTTCCC
CGAACCGGTGACGGTGTCGTGGAACTCAGGGGCCCTGACCAGCGGCGTGCACACCTTCCCGGCTGT
CCTACAGTCCTCAGGACTCTACTCCCTCAGCAGCGTGGTGACCGTGCCCTCCAGCAGCTTGGGCAC
CCAGACCTACATCTGCAACGTGAATCACAAGCCCAGCAACACCAAGGTGGACAAGAAAGTTGAGC
CCAAATCTTGTGACAAAACTCACACATGCCCACCGTGCCCAGCACCTGAACTCCTGGGGGGACCGT
CAGTCTTCCTCTTCCCCCCAAAACCCAAGGACACCCTCATGATCTCCCGGACCCCTGAGGTCACATG
CGTGGTGGTGGACGTGAGCCACGAAGACCCTGAGGTCAAGTTCAACTGGTACGTGGACGGCGTGG
AGGTGCATAATGCCAAGACAAAGCCGCGGGAGGAGCAGTACAACAGCACGTACCGTGTGGTCAGC
GTCCTCACCGTCCTGCACCAGGACTGGCTGAATGGCAAGGAGTACAAGTGCAAGGTCTCCAACAA
AGCCCTCCCAGCCCCCATCGAGAAAACCATCTCCAAAGCCAAAGGGCAGCCCCGAGAACCACAGG
TGTACACCCTGCCCCCATCCCGGGAGGAGATGACCAAGAACCAGGTCAGCCTGACCTGCCTGGTCA
AAGGCTTCTATCCCAGCGACATCGCCGTGGAGTGGGAGAGCAATGGGCAGCCGGAGAACAACTAC
AAGACCACGCCTCCCGTGCTGGACTCCGACGGCTCCTTCTTCCTCTATAGCAAGCTCACCGTGGAC
AAGAGCAGGTGGCAGCAGGGGAACGTCTTCTCATGCTCCGTGATGCATGAGGCTCTGCACAACCAC
TACACGCAGAAGAGCCTCTCCCTGTCTCCGGGTAAATGA
SEQ ID NO: 659
QVQLVQSGAEVKKPGASVKVSCKVSGYTFTSYFIHWVRQAPGQGLEWMGIINPISVSTSYAQKFQGRV
TMTRDTSTSTVFMELSSLRSEDTAVYYCARGGIQLWLHFDYWGQGTLVTVSSASTKGPSVFPLAPSSKS
TSGGTAALGCLVKDYFPEPVTVSWNSGALTSGVHTFPAVLQSSGLYSLSSVVTVPSSSLGTQTYICNVN
HKPSNTKVDKKVEPKSCDKTHTCPPCPAPELLGGPSVFLFPPKPKDTLMISRTPEVTCVVVDVSHEDPEV
KFNWYVDGVEVHNAKTKPREEQYNSTYRVVSVLTVLHQDWLNGKEYKCKVSNKALPAPIEKTISKAK
GQPREPQVYTLPPSREEMTKNQVSLTCLVKGFYPSDIAVEWESNGQPENNYKTTPPVLDSDGSFFLYSK
LTVDKSRWQQGNVFSCSVMHEALHNHYTQKSLSLSPGK
SEQ ID NO: 660
22D1
CAGGTGCAGCTGGTGCAGTCTGGGGCTGAGGTGAAGAAGCCTGGGGCCTCAGTGAGGGTTTCCTGC
AAGGTTTCTGGATACACCTTCACCAGCTACTTTATTCACTGGGTACGCCAGGCCCCTGGACAAGGG
CTTGAGTGGATGGGAATAATCAACCCTATTAGTGTTAGCACAAGCTACGCACAGAAGTTCCAGGGC
AGAGTCACCATGACCAGGGACACGTCCACGAGCACAGTCTTCATGGAGCTGAGCAGCCTGAGATC
TGAGGACACGGCCGTGTATTACTGTGCGCGAGGGGGGATACAGCTATGGTTACATTTGGACTACTG
GGGCCAGGGAACCCTGGTCACCGTCTCCTCAGCTTCCACCAAGGGCCCATCCGTCTTCCCCCTGGC
GCCCTCCTCCAAGAGCACCTCTGGGGGCACAGCGGCCCTGGGCTGCCTGGTCAAGGACTACTTCCC
CGAACCGGTGACGGTGTCGTGGAACTCAGGGGCCCTGACCAGCGGCGTGCACACCTTCCCGGCTGT
CCTACAGTCCTCAGGACTCTACTCCCTCAGCAGCGTGGTGACCGTGCCCTCCAGCAGCTTGGGCAC
CCAGACCTACATCTGCAACGTGAATCACAAGCCCAGCAACACCAAGGTGGACAAGAAAGTTGAGC
CCAAATCTTGTGACAAAACTCACACATGCCCACCGTGCCCAGCACCTGAACTCCTGGGGGGACCGT
CAGTCTTCCTCTTCCCCCCAAAACCCAAGGACACCCTCATGATCTCCCGGACCCCTGAGGTCACATG
CGTGGTGGTGGACGTGAGCCACGAAGACCCTGAGGTCAAGTTCAACTGGTACGTGGACGGCGTGG
AGGTGCATAATGCCAAGACAAAGCCGCGGGAGGAGCAGTACAACAGCACGTACCGTGTGGTCAGC
GTCCTCACCGTCCTGCACCAGGACTGGCTGAATGGCAAGGAGTACAAGTGCAAGGTCTCCAACAA
AGCCCTCCCAGCCCCCATCGAGAAAACCATCTCCAAAGCCAAAGGGCAGCCCCGAGAACCACAGG
TGTACACCCTGCCCCCATCCCGGGAGGAGATGACCAAGAACCAGGTCAGCCTGACCTGCCTGGTCA
AAGGCTTCTATCCCAGCGACATCGCCGTGGAGTGGGAGAGCAATGGGCAGCCGGAGAACAACTAC
AAGACCACGCCTCCCGTGCTGGACTCCGACGGCTCCTTCTTCCTCTATAGCAAGCTCACCGTGGAC
AAGAGCAGGTGGCAGCAGGGGAACGTCTTCTCATGCTCCGTGATGCATGAGGCTCTGCACAACCAC
TACACGCAGAAGAGCCTCTCCCTGTCTCCGGGTAAATGA
SEQ ID NO: 661
QVQLVQSGAEVKKPGASVRVSCKVSGYTFTSYFIHWVRQAPGQGLEWMGIINPISVSTSYAQKFQGRV
TMTRDTSTSTVFMELSSLRSEDTAVYYCARGGIQLWLHLDYWGQGTLVTVSSASTKGPSVFPLAPSSKS
TSGGTAALGCLVKDYFPEPVTVSWNSGALTSGVHTFPAVLQSSGLYSLSSVVTVPSSSLGTQTYICNVN
HKPSNTKVDKKVEPKSCDKTHTCPPCPAPELLGGPSVFLFPPKPKDTLMISRTPEVTCVVVDVSHEDPEV
KFNWYVDGVEVHNAKTKPREEQYNSTYRVVSVLTVLHQDWLNGKEYKCKVSNKALPAPIEKTISKAK
GQPREPQVYTLPPSREEMTKNQVSLTCLVKGFYPSDIAVEWESNGQPENNYKTTPPVLDSDGSFFLYSK
LTVDKSRWQQGNVFSCSVMHEALHNHYTQKSLSLSPGK
SEQ ID NO: 662
22G10
GAGGTGCAACTGTTGGAGTCTGGGGGAGGCTTGGTACAGCCTGGGGGGTCCCTGAGACTCTCCTGT
GCAGCCTCTGGATTCACCTTTAGCAGTTATGCCATGAACTGGGTCCGCCAGGCTCCAGGGAAGGGG
CTGGAGTGGGTCTCAACTATTAGTGGTGGTGGTGCTAACACATACTACGCAGACTCCGTGAAGGGC
CGGTTCACCATCTCCAGTGACAATTCCAAGAGCACGCTGTATCTGCAAATGAACAGCCTGAGAGCC
GCGGACACGGCCGTATATCACTGTGCGAAAGGGGGAATGGGGGGATACTACTACGGTATGGACGT
CTGGGGCCAAGGGACCACGGTCACCGTCTCCTCAGCTTCCACCAAGGGCCCATCCGTCTTCCCCCT
GGCGCCCTCCTCCAAGAGCACCTCTGGGGGCACAGCGGCCCTGGGCTGCCTGGTCAAGGACTACTT
CCCCGAACCGGTGACGGTGTCGTGGAACTCAGGGGCCCTGACCAGCGGCGTGCACACCTTCCCGGC
TGTCCTACAGTCCTCAGGACTCTACTCCCTCAGCAGCGTGGTGACCGTGCCCTCCAGCAGCTTGGGC
ACCCAGACCTACATCTGCAACGTGAATCACAAGCCCAGCAACACCAAGGTGGACAAGAAAGTTGA
GCCCAAATCTTGTGACAAAACTCACACATGCCCACCGTGCCCAGCACCTGAACTCCTGGGGGGACC
GTCAGTCTTCCTCTTCCCCCCAAAACCCAAGGACACCCTCATGATCTCCCGGACCCCTGAGGTCACA
TGCGTGGTGGTGGACGTGAGCCACGAAGACCCTGAGGTCAAGTTCAACTGGTACGTGGACGGCGT
GGAGGTGCATAATGCCAAGACAAAGCCGCGGGAGGAGCAGTACAACAGCACGTACCGTGTGGTCA
GCGTCCTCACCGTCCTGCACCAGGACTGGCTGAATGGCAAGGAGTACAAGTGCAAGGTCTCCAACA
AAGCCCTCCCAGCCCCCATCGAGAAAACCATCTCCAAAGCCAAAGGGCAGCCCCGAGAACCACAG
GTGTACACCCTGCCCCCATCCCGGGAGGAGATGACCAAGAACCAGGTCAGCCTGACCTGCCTGGTC
AAAGGCTTCTATCCCAGCGACATCGCCGTGGAGTGGGAGAGCAATGGGCAGCCGGAGAACAACTA
CAAGACCACGCCTCCCGTGCTGGACTCCGACGGCTCCTTCTTCCTCTATAGCAAGCTCACCGTGGAC
AAGAGCAGGTGGCAGCAGGGGAACGTCTTCTCATGCTCCGTGATGCATGAGGCTCTGCACAACCAC
TACACGCAGAAGAGCCTCTCCCTGTCTCCGGGTAAATGA
SEQ ID NO: 663
EVQLLESGGGLVQPGGSLRLSCAASGFTFSSYAMNWVRQAPGKGLEWVSTISGGGANTYYADSVKGR
FTISSDNSKSTLYLQMNSLRAADTAVYHCAKGGMGGYYYGMDVWGQGTTVTVSSASTKGPSVFPLAP
SSKSTSGGTAALGCLVKDYFPEPVTVSWNSGALTSGVHTFPAVLQSSGLYSLSSVVTVPSSSLGTQTYIC
NVNHKPSNTKVDKKVEPKSCDKTHTCPPCPAPELLGGPSVFLFPPKPKDTLMISRTPEVTCVVVDVSHE
DPEVKFNWYVDGVEVHNAKTKPREEQYNSTYRVVSVLTVLHQDWLNGKEYKCKVSNKALPAPIEKTI
SKAKGQPREPQVYTLPPSREEMTKNQVSLTCLVKGFYPSDIAVEWESNGQPENNYKTTPPVLDSDGSFF
LYSKLTVDKSRWQQGNVFSCSVMHEALHNHYTQKSLSLSPGK
SEQ ID NO: 664
23A10
CAGGTGCAGCTGGTGGAGTCTGGGGGAGGCGTGGTCCAGCCTGGGAGGTCCCTGAGACTCTCCTGT
GCAGCGTCTGGATTCACCTTCAGTCGCTATGGCATACACTGGGTCCGCCAGGCTCCAGGCAAGGGG
CTGGAGTGGGTGGCAGTTATATGGTATGATGGAAGTAATAAATACTATGCAGACTCCGTGAAGGGC
CGATTCACCATCTCCAGAGACAATTCCAAGAACACGCTGTATCTGCTAATGAACAGCCTGAGAGCC
GAGGACTCGGCTGTGTATTACTGTGCGAGAAGGGCCGGTATACCTGGAACTACGGGCTACTACTAT
GGTATGGACGTCTGGGGCCAAGGGACCACGGTCACCGTCTCCTCAGCTTCCACCAAGGGCCCATCC
GTCTTCCCCCTGGCGCCCTCCTCCAAGAGCACCTCTGGGGGCACAGCGGCCCTGGGCTGCCTGGTC
AAGGACTACTTCCCCGAACCGGTGACGGTGTCGTGGAACTCAGGGGCCCTGACCAGCGGCGTGCA
CACCTTCCCGGCTGTCCTACAGTCCTCAGGACTCTACTCCCTCAGCAGCGTGGTGACCGTGCCCTCC
AGCAGCTTGGGCACCCAGACCTACATCTGCAACGTGAATCACAAGCCCAGCAACACCAAGGTGGA
CAAGAAAGTTGAGCCCAAATCTTGTGACAAAACTCACACATGCCCACCGTGCCCAGCACCTGAACT
CCTGGGGGGACCGTCAGTCTTCCTCTTCCCCCCAAAACCCAAGGACACCCTCATGATCTCCCGGAC
CCCTGAGGTCACATGCGTGGTGGTGGACGTGAGCCACGAAGACCCTGAGGTCAAGTTCAACTGGTA
CGTGGACGGCGTGGAGGTGCATAATGCCAAGACAAAGCCGCGGGAGGAGCAGTACAACAGCACGT
ACCGTGTGGTCAGCGTCCTCACCGTCCTGCACCAGGACTGGCTGAATGGCAAGGAGTACAAGTGCA
AGGTCTCCAACAAAGCCCTCCCAGCCCCCATCGAGAAAACCATCTCCAAAGCCAAAGGGCAGCCC
CGAGAACCACAGGTGTACACCCTGCCCCCATCCCGGGAGGAGATGACCAAGAACCAGGTCAGCCT
GACCTGCCTGGTCAAAGGCTTCTATCCCAGCGACATCGCCGTGGAGTGGGAGAGCAATGGGCAGC
CGGAGAACAACTACAAGACCACGCCTCCCGTGCTGGACTCCGACGGCTCCTTCTTCCTCTATAGCA
AGCTCACCGTGGACAAGAGCAGGTGGCAGCAGGGGAACGTCTTCTCATGCTCCGTGATGCATGAG
GCTCTGCACAACCACTACACGCAGAAGAGCCTCTCCCTGTCTCCGGGTAAATGA
SEQ ID NO: 665
QVQLVESGGGVVQPGRSLRLSCAASGFTFSRYGIHWVRQAPGKGLEWVAVIWYDGSNKYYADSVKGR
FTISRDNSKNTLYLLMNSLRAEDSAVYYCARRAGIPGTTGYYYGMDVWGQGTTVTVSSASTKGPSVFP
LAPSSKSTSGGTAALGCLVKDYFPEPVTVSWNSGALTSGVHTFPAVLQSSGLYSLSSVVTVPSSSLGTQT
YICNVNHKPSNTKVDKKVEPKSCDKTHTCPPCPAPELLGGPSVFLFPPKPKDTLMISRTPEVTCVVVDVS
HEDPEVKFNWYVDGVEVHNAKTKPREEQYNSTYRVVSVLTVLHQDWLNGKEYKCKVSNKALPAPIE
KTISKAKGQPREPQVYTLPPSREEMTKNQVSLTCLVKGFYPSDIAVEWESNGQPENNYKTTPPVLDSDG
SFFLYSKLTVDKSRWQQGNVFSCSVMHEALHNHYTQKSLSLSPGK
SEQ ID NO: 666
25F8
CAGGTGCAGCTGGTGCAGTCTGGGGCTGAGGTGAAGAAGCCTGGGGCCTCAGTGAAGGTTTCCTGC
AAGGCATCTGGATACACCTTCACCAGCTACTATATTCACTGGGTGCGCCAGGCCCCTGGACAAGGA
CTTGAGTGGATGGGAATAATCAACCCCAGTGGTGGTAGCACAAGGTACGCACAGAAGTTCCAGGG
CAGAGTCACCATGACCAGGGACACGTCCACGAGCACAGTCTTCATGGAGCTGAGCAGCCTGAGAT
CTGAGGACACGGCCGTGTATTACTGTGCGCGAGGGGGAATACAGCTATGGTTACATTTTGACTACT
GGGGCCAGGGAACCCTGGTCACCGTCTCCTCAGCTTCCACCAAGGGCCCATCCGTCTTCCCCCTGG
CGCCCTCCTCCAAGAGCACCTCTGGGGGCACAGCGGCCCTGGGCTGCCTGGTCAAGGACTACTTCC
CCGAACCGGTGACGGTGTCGTGGAACTCAGGGGCCCTGACCAGCGGCGTGCACACCTTCCCGGCTG
TCCTACAGTCCTCAGGACTCTACTCCCTCAGCAGCGTGGTGACCGTGCCCTCCAGCAGCTTGGGCA
CCCAGACCTACATCTGCAACGTGAATCACAAGCCCAGCAACACCAAGGTGGACAAGAAAGTTGAG
CCCAAATCTTGTGACAAAACTCACACATGCCCACCGTGCCCAGCACCTGAACTCCTGGGGGGACCG
TCAGTCTTCCTCTTCCCCCCAAAACCCAAGGACACCCTCATGATCTCCCGGACCCCTGAGGTCACAT
GCGTGGTGGTGGACGTGAGCCACGAAGACCCTGAGGTCAAGTTCAACTGGTACGTGGACGGCGTG
GAGGTGCATAATGCCAAGACAAAGCCGCGGGAGGAGCAGTACAACAGCACGTACCGTGTGGTCAG
CGTCCTCACCGTCCTGCACCAGGACTGGCTGAATGGCAAGGAGTACAAGTGCAAGGTCTCCAACAA
AGCCCTCCCAGCCCCCATCGAGAAAACCATCTCCAAAGCCAAAGGGCAGCCCCGAGAACCACAGG
TGTACACCCTGCCCCCATCCCGGGAGGAGATGACCAAGAACCAGGTCAGCCTGACCTGCCTGGTCA
AAGGCTTCTATCCCAGCGACATCGCCGTGGAGTGGGAGAGCAATGGGCAGCCGGAGAACAACTAC
AAGACCACGCCTCCCGTGCTGGACTCCGACGGCTCCTTCTTCCTCTATAGCAAGCTCACCGTGGAC
AAGAGCAGGTGGCAGCAGGGGAACGTCTTCTCATGCTCCGTGATGCATGAGGCTCTGCACAACCAC
TACACGCAGAAGAGCCTCTCCCTGTCTCCGGGTAAATGA
SEQ ID NO: 667
QVQLVQSGAEVKKPGASVKVSCKASGYTFTSYYIHWVRQAPGQGLEWMGIINPSGGSTRYAQKFQGR
VTMTRDTSTSTVFMELSSLRSEDTAVYYCARGGIQLWLHFDYWGQGTLVTVSSASTKGPSVFPLAPSSK
STSGGTAALGCLVKDYFPEPVTVSWNSGALTSGVHTFPAVLQSSGLYSLSSVVTVPSSSLGTQTYICNVN
HKPSNTKVDKKVEPKSCDKTHTCPPCPAPELLGGPSVFLFPPKPKDTLMISRTPEVTCVVVDVSHEDPEV
KFNWYVDGVEVHNAKTKPREEQYNSTYRVVSVLTVLHQDWLNGKEYKCKVSNKALPAPIEKTISKAK
GQPREPQVYTLPPSREEMTKNQVSLTCLVKGFYPSDIAVEWESNGQPENNYKTTPPVLDSDGSFFLYSK
LTVDKSRWQQGNVFSCSVMHEALHNHYTQKSLSLSPGK
SEQ ID NO: 668
25G10
CAGGTGCAGCTGCAGGAGTCGGGCCCAGGACTGGTGAAGCCTTCGGAGACCCTGTCCCTCACCTGC
ACTGTCTCTGGTGGCTCCATCAGTGGTTACTACTGGAGCTGGATCCGGCAGCCCCCAGGGAAGGGA
CTGGAGTGGATTGGGTATATCTATTACATTGGGAGCACCAACTACAACCCCTCCCTCAAGAGTCGA
GTCACCATGTCAGTAGACACGTCCAAGAACCAGTTCTCCCTGAAGCTGAGCTCTGTGACCGCTGCG
GACACGGCCGTGTATTACTGTGCGAGAGATGGGAGCAGTGGCTGGTACCGGTGGTTCGACCCCTGG
GGCCAGGGAACCCTGGTCACCGTCTCCTCAGCTTCCACCAAGGGCCCATCCGTCTTCCCCCTGGCG
CCCTCCTCCAAGAGCACCTCTGGGGGCACAGCGGCCCTGGGCTGCCTGGTCAAGGACTACTTCCCC
GAACCGGTGACGGTGTCGTGGAACTCAGGGGCCCTGACCAGCGGCGTGCACACCTTCCCGGCTGTC
CTACAGTCCTCAGGACTCTACTCCCTCAGCAGCGTGGTGACCGTGCCCTCCAGCAGCTTGGGCACC
CAGACCTACATCTGCAACGTGAATCACAAGCCCAGCAACACCAAGGTGGACAAGAAAGTTGAGCC
CAAATCTTGTGACAAAACTCACACATGCCCACCGTGCCCAGCACCTGAACTCCTGGGGGGACCGTC
AGTCTTCCTCTTCCCCCCAAAACCCAAGGACACCCTCATGATCTCCCGGACCCCTGAGGTCACATGC
GTGGTGGTGGACGTGAGCCACGAAGACCCTGAGGTCAAGTTCAACTGGTACGTGGACGGCGTGGA
GGTGCATAATGCCAAGACAAAGCCGCGGGAGGAGCAGTACAACAGCACGTACCGTGTGGTCAGCG
TCCTCACCGTCCTGCACCAGGACTGGCTGAATGGCAAGGAGTACAAGTGCAAGGTCTCCAACAAA
GCCCTCCCAGCCCCCATCGAGAAAACCATCTCCAAAGCCAAAGGGCAGCCCCGAGAACCACAGGT
GTACACCCTGCCCCCATCCCGGGAGGAGATGACCAAGAACCAGGTCAGCCTGACCTGCCTGGTCAA
AGGCTTCTATCCCAGCGACATCGCCGTGGAGTGGGAGAGCAATGGGCAGCCGGAGAACAACTACA
AGACCACGCCTCCCGTGCTGGACTCCGACGGCTCCTTCTTCCTCTATAGCAAGCTCACCGTGGACA
AGAGCAGGTGGCAGCAGGGGAACGTCTTCTCATGCTCCGTGATGCATGAGGCTCTGCACAACCACT
ACACGCAGAAGAGCCTCTCCCTGTCTCCGGGTAAATGA
SEQ ID NO: 669
QVQLQESGPGLVKPSETLSLTCTVSGGSISGYYWSWIRQPPGKGLEWIGYIYYIGSTNYNPSLKSRVTMS
VDTSKNQFSLKLSSVTAADTAVYYCARDGSSGWYRWFDPWGQGTLVTVSSASTKGPSVFPLAPSSKST
SGGTAALGCLVKDYFPEPVTVSWNSGALTSGVHTFPAVLQSSGLYSLSSVVTVPSSSLGTQTYICNVNH
KPSNTKVDKKVEPKSCDKTHTCPPCPAPELLGGPSVFLFPPKPKDTLMISRTPEVTCVVVDVSHEDPEVK
FNWYVDGVEVHNAKTKPREEQYNSTYRVVSVLTVLHQDWLNGKEYKCKVSNKALPAPIEKTISKAKG
QPREPQVYTLPPSREEMTKNQVSLTCLVKGFYPSDIAVEWESNGQPENNYKTTPPVLDSDGSFFLYSKL
TVDKSRWQQGNVFSCSVMHEALHNHYTQKSLSLSPG
SEQ ID NO: 670
26D1
CAGGTGCAGTTGGTGCAGTCTGGGGCTGAGGTGAAGAAGCCTGGGGCCTCAGTGAAGGTTTCCTGT
AAGGCATCTAGATACACCTTCACCAGCTACTATATGTCCTGGGTGCGACAGGCCCCTGGACAAGGG
CTTGAGTGGATGGGAATAATCCACCCTAGTGGTGGTGACACAACCTACGCACAGAAGTTCCAGGGC
AGAGTCACCATGACCGGGGACACGTCCACGAGCACAGTCTACATGGAGCTGAGCAGCCTGAGATC
TGAGGACACGGCCGTGTATTACTGTGCGAGAGGGGGGATAAAACTATGGTTACATTTTGACTATTG
GGGCCAGGGAACCCTGGTCACCGTCTCCTCAGCTTCCACCAAGGGCCCATCCGTCTTCCCCCTGGC
GCCCTCCTCCAAGAGCACCTCTGGGGGCACAGCGGCCCTGGGCTGCCTGGTCAAGGACTACTTCCC
CGAACCGGTGACGGTGTCGTGGAACTCAGGGGCCCTGACCAGCGGCGTGCACACCTTCCCGGCTGT
CCTACAGTCCTCAGGACTCTACTCCCTCAGCAGCGTGGTGACCGTGCCCTCCAGCAGCTTGGGCAC
CCAGACCTACATCTGCAACGTGAATCACAAGCCCAGCAACACCAAGGTGGACAAGAAAGTTGAGC
CCAAATCTTGTGACAAAACTCACACATGCCCACCGTGCCCAGCACCTGAACTCCTGGGGGGACCGT
CAGTCTTCCTCTTCCCCCCAAAACCCAAGGACACCCTCATGATCTCCCGGACCCCTGAGGTCACATG
CGTGGTGGTGGACGTGAGCCACGAAGACCCTGAGGTCAAGTTCAACTGGTACGTGGACGGCGTGG
AGGTGCATAATGCCAAGACAAAGCCGCGGGAGGAGCAGTACAACAGCACGTACCGTGTGGTCAGC
GTCCTCACCGTCCTGCACCAGGACTGGCTGAATGGCAAGGAGTACAAGTGCAAGGTCTCCAACAA
AGCCCTCCCAGCCCCCATCGAGAAAACCATCTCCAAAGCCAAAGGGCAGCCCCGAGAACCACAGG
TGTACACCCTGCCCCCATCCCGGGAGGAGATGACCAAGAACCAGGTCAGCCTGACCTGCCTGGTCA
AAGGCTTCTATCCCAGCGACATCGCCGTGGAGTGGGAGAGCAATGGGCAGCCGGAGAACAACTAC
AAGACCACGCCTCCCGTGCTGGACTCCGACGGCTCCTTCTTCCTCTATAGCAAGCTCACCGTGGAC
AAGAGCAGGTGGCAGCAGGGGAACGTCTTCTCATGCTCCGTGATGCATGAGGCTCTGCACAACCAC
TACACGCAGAAGAGCCTCTCCCTGTCTCCGGGTAAATGA
SEQ ID NO: 671
QVQLVQSGAEVKKPGASVKVSCKASRYTFTSYYMSWVRQAPGQGLEWMGIIHPSGGDTTYAQKFQGR
VTMTGDTSTSTVYMELSSLRSEDTAVYYCARGGIKLWLHFDYWGQGTLVTVSSASTKGPSVFPLAPSS
KSTSGGTAALGCLVKDYFPEPVTVSWNSGALTSGVHTFPAVLQSSGLYSLSSVVTVPSSSLGTQTYICNV
NHKPSNTKVDKKVEPKSCDKTHTCPPCPAPELLGGPSVFLFPPKPKDTLMISRTPEVTCVVVDVSHEDPE
VKFNWYVDGVEVHNAKTKPREEQYNSTYRVVSVLTVLHQDWLNGKEYKCKVSNKALPAPIEKTISKA
KGQPREPQVYTLPPSREEMTKNQVSLTCLVKGFYPSDIAVEWESNGQPENNYKTTPPVLDSDGSFFLYS
KLTVDKSRWQQGNVFSCSVMHEALHNHYTQKSLSLSPGK
SEQ ID NO: 672
26F12
CAGGTGCAGTTGGTGCAGTCTGGGGCTGAGGTGAAGAAGCCTGGGGCCTCAGTGAAGGTTTCCTGC
AAGGCATCTAGATACACCTTCACCAACTACTATATGTCCTGGGTGCGACAGGCCCCTGGACAAGGG
CTTGAGTGGATGGGAATAATCAACCCTAGTGGTGGTGACTCAACCTACGCACAGAAGTTCCAGGGC
AGACTCACCATGACCGGGGACACGTCCACGAGCACAGTCTACATGGAGCTGAGCAGCCTGAGATC
TGAGGACACGGCCGTGTATTACTGTGCGAGAGGGGGGATACAACTATGGTTACATTTTGACTACTG
GGGCCAGGGAACCCTGGTCACCGTCTCCTCAGCTTCCACCAAGGGCCCATCCGTCTTCCCCCTGGC
GCCCTCCTCCAAGAGCACCTCTGGGGGCACAGCGGCCCTGGGCTGCCTGGTCAAGGACTACTTCCC
CGAACCGGTGACGGTGTCGTGGAACTCAGGGGCCCTGACCAGCGGCGTGCACACCTTCCCGGCTGT
CCTACAGTCCTCAGGACTCTACTCCCTCAGCAGCGTGGTGACCGTGCCCTCCAGCAGCTTGGGCAC
CCAGACCTACATCTGCAACGTGAATCACAAGCCCAGCAACACCAAGGTGGACAAGAAAGTTGAGC
CCAAATCTTGTGACAAAACTCACACATGCCCACCGTGCCCAGCACCTGAACTCCTGGGGGGACCGT
CAGTCTTCCTCTTCCCCCCAAAACCCAAGGACACCCTCATGATCTCCCGGACCCCTGAGGTCACATG
CGTGGTGGTGGACGTGAGCCACGAAGACCCTGAGGTCAAGTTCAACTGGTACGTGGACGGCGTGG
AGGTGCATAATGCCAAGACAAAGCCGCGGGAGGAGCAGTACAACAGCACGTACCGTGTGGTCAGC
GTCCTCACCGTCCTGCACCAGGACTGGCTGAATGGCAAGGAGTACAAGTGCAAGGTCTCCAACAA
AGCCCTCCCAGCCCCCATCGAGAAAACCATCTCCAAAGCCAAAGGGCAGCCCCGAGAACCACAGG
TGTACACCCTGCCCCCATCCCGGGAGGAGATGACCAAGAACCAGGTCAGCCTGACCTGCCTGGTCA
AAGGCTTCTATCCCAGCGACATCGCCGTGGAGTGGGAGAGCAATGGGCAGCCGGAGAACAACTAC
AAGACCACGCCTCCCGTGCTGGACTCCGACGGCTCCTTCTTCCTCTATAGCAAGCTCACCGTGGAC
AAGAGCAGGTGGCAGCAGGGGAACGTCTTCTCATGCTCCGTGATGCATGAGGCTCTGCACAACCAC
TACACGCAGAAGAGCCTCTCCCTGTCTCCGGGTAAATGA
SEQ ID NO: 673
QVQLVQSGAEVKKPGASVKVSCKASRYTFTNYYMSWVRQAPGQGLEWMGIINPSGGDSTYAQKFQG
RLTMTGDTSTSTVYMELSSLRSEDTAVYYCARGGIQLWLHFDYWGQGTLVTVSSASTKGPSVFPLAPSS
KSTSGGTAALGCLVKDYFPEPVTVSWNSGALTSGVHTFPAVLQSSGLYSLSSVVTVPSSSLGTQTYICNV
NHKPSNTKVDKKVEPKSCDKTHTCPPCPAPELLGGPSVFLFPPKPKDTLMISRTPEVTCVVVDVSHEDPE
VKFNWYVDGVEVHNAKTKPREEQYNSTYRVVSVLTVLHQDWLNGKEYKCKVSNKALPAPIEKTISKA
KGQPREPQVYTLPPSREEMTKNQVSLTCLVKGFYPSDIAVEWESNGQPENNYKTTPPVLDSDGSFFLYS
KLTVDKSRWQQGNVFSCSVMHEALHNHYTQKSLSLSPGK
SEQ ID NO: 674

TABLE IIIb
Light Chain Variable and Contant Region Polynucleotide and Amino acid
Sequences

2G6
TCCTATGAACTGACTCAGCCACCCTCAGTGTCCGTGTCCCCAGGACAGACAGCCAGCATCACCTGC
TCTGGAGATAGGTTGGGGGAAAAATATACTTGCTGGTATCAGCAGAGGCCAGGCCAGTCCCCTTTG
CTGGTCATCTATCAAGATACCAAGCGGCCCTCAGGGATCCCTGAGCGATTCTCTGGCTCCAACTCT
GGTAACACAGCCACTCTGACCATCAGCGGGACCCAGGCTATGGATGAGGCTGACTATTACTGTCAG
GCGTGGGACAGCAGCACTGTGGTATTCGGCGGAGGGACCAAGCTGACCGTCCTAGGTCAGCCCAA
GGCCAACCCCACTGTCACTCTGTTCCCGCCCTCCTCTGAGGAGCTCCAAGCCAACAAGGCCACACT
AGTGTGTCTGATCAGTGACTTCTACCCGGGAGCTGTGACAGTGGCCTGGAAGGCAGATGGCAGCCC
CGTCAAGGCGGGAGTGGAGACCACCAAACCCTCCAAACAGAGCAACAACAAGTACGCGGCCAGCA
GCTACCTGAGCCTGACGCCCGAGCAGTGGAAGTCCCACAGAAGCTACAGCTGCCAGGTCACGCAT
GAAGGGAGCACCGTGGAGAAGACAGTGGCCCCTACAGAATGTTCATGA
SEQ ID NO: 675
SYELTQPPSVSVSPGQTASITCSGDRLGEKYTCWYQQRPGQSPLLVIYQDTKRPSGIPERFSGSNSGNTAT
LTISGTQAMDEADYYCQAWDSSTVVFGGGTKLTVLGQPKANPTVTLFPPSSEELQANKATLVCLISDFY
PGAVTVAWKADGSPVKAGVETTKPSKQSNNKYAASSYLSLTPEQWKSHRSYSCQVTHEGSTVEKTVA
PTECS
SEQ ID NO: 676
4A2
GAAATTGTGTTGACGCAGTCTCCAGGCACCCTGTCTTTGTCTCCAGGGGAAAGAGCCACCCTCTCCT
GCAGGGCCAGTCGGAATATTAGCAGCAGCTACTTAGCCTGGTACCAGCAGAAACCTGGCCAGGCT
CCCAGGCTCCTCATCTATGGTCCATCCAGCAGGGCCACTGGCATCCCAGACAGGTTCAGTGGCAGT
GGGTCTGGGACAGACTTCACTCTCACCATCAGCAGACTGGAGCCTGAAGATTTTACAGTGTATTAC
TGTCAGCAGTATGGTAGCTCATTCACTTTCGGCCCTGGGACCAAAGTGGATATCAAACGTACGGTG
GCTGCACCATCTGTCTTCATCTTCCCGCCATCTGATGAGCAGTTGAAATCTGGAACTGCCTCTGTTG
TGTGCCTGCTGAATAACTTCTATCCCAGAGAGGCCAAAGTACAGTGGAAGGTGGATAACGCCCTCC
AATCGGGTAACTCCCAGGAGAGTGTCACAGAGCAGGACAGCAAGGACAGCACCTACAGCCTCAGC
AGCACCCTGACGCTGAGCAAAGCAGACTACGAGAAACACAAAGTCTACGCCTGCGAAGTCACCCA
TCAGGGCCTGAGCTCGCCCGTCACAAAGAGCTTCAACAGGGGAGAGTGTTGA
SEQ ID NO: 677
EIVLTQSPGTLSLSPGERATLSCRASRNISSSYLAWYQQKPGQAPRLLIYGPSSRATGIPDRFSGSGSGTDF
TLTISRLEPEDFTVYYCQQYGSSFTFGPGTKVDIKRTVAAPSVFIFPPSDEQLKSGTASVVCLLNNFYPRE
AKVQWKVDNALQSGNSQESVTEQDSKDSTYSLSSTLTLSKADYEKHKVYACEVTHQGLSSPVTKSFNR
GEC
SEQ ID NO: 678
4A9
CAGTCTGTGCTGACGCAGCCGCCCTCAGTGTCTGGGGCCCCAGGACAGAGGGTCACCATCTCCTGC
ACTGGGAGCAGCTCCAACATCGGGACAGGTTATGCTGTACACTGGTACCAGCAGTTTCCAGGAACA
GCCCCCAAACTCCTCATCTATGGTAACAACAATCGGCCCTCAGGGGTTCCTGACCGATTCTCTGGCT
CCAAGTCTGGCACCTCAGCCTCCCTGGCCATCACTGGGCTCCAGGCTGAGGATGAGGCTGATTATT
ACTGCCAGTCCTATGACAGCAGACTGAGTGGTTGGGTGTTCGGCGGAGGGACCAAGCTGACCGTCC
TAGGTCAGCCCAAGGCCAACCCCACTGTCACTCTGTTCCCGCCCTCCTCTGAGGAGCTCCAAGCCA
ACAAGGCCACACTAGTGTGTCTGATCAGTGACTTCTACCCGGGAGCTGTGACAGTGGCCTGGAAGG
CAGATGGCAGCCCCGTCAAGGCGGGAGTGGAGACCACCAAACCCTCCAAACAGAGCAACAACAAG
TACGCGGCCAGCAGCTACCTGAGCCTGACGCCCGAGCAGTGGAAGTCCCACAGAAGCTACAGCTG
CCAGGTCACGCATGAAGGGAGCACCGTGGAGAAGACAGTGGCCCCTACAGAATGTTCATGA
SEQ ID NO: 679
QSVLTQPPSVSGAPGQRVTISCTGSSSNIGTGYAVHWYQQFPGTAPKLLIYGNNNRPSGVPDRFSGSKSG
TSASLAITGLQAEDEADYYCQSYDSRLSGWVFGGGTKLTVLGQPKANPTVTLFPPSSEELQANKATLVC
LISDFYPGAVTVAWKADGSPVKAGVETTKPSKQSNNKYAASSYLSLTPEQWKSHRSYSCQVTHEGSTV
EKTVAPTECS
SEQ ID NO: 680
4B10
GAAATTGTATTGACGCAGTCTCCAGGCACCCTGTCTTTGTCTCCAGGGGAAAGAGCCACCCTCTCCT
GCAGGGCCAGTCAGAGTGTTAGCAACACCTACTTAGCCTGGTACCATCAGAGACCTGGCCAGGCTC
CCAGGCTCCTCATCTATGGTGCATCCAGCAGGGCCACTGGCATCCCAGACAGATTCAGTGGCAGTG
GGTCTGGGACAGACTTCGCTCTCACCATCAGCAGTCTGGAGCCTGAAGATTTTGCAGTGTATTACT
GTCAGCAGTACAGTAACTCGTGGACGTTCGGCCAAGGGACCAAGGTGGAAATCAAACGAACTGTG
GCTGCACCATCTGTCTTCATCTTCCCGCCATCTGATGAGCAGTTGAAATCTGGAACTGCCTCTGTTG
TGTGCCTGCTGAATAACTTCTATCCCAGAGAGGCCAAAGTACAGTGGAAGGTGGATAACGCCCTCC
AATCGGGTAACTCCCAGGAGAGTGTCACAGAGCAGGACAGCAAGGACAGCACCTACAGCCTCAGC
AGCACCCTGACGCTGAGCAAAGCAGACTACGAGAAACACAAAGTCTACGCCTGCGAAGTCACCCA
TCAGGGCCTGAGCTCGCCCGTCACAAAGAGCTTCAACAGGGGAGAGTGTTGA
SEQ ID NO: 681
EIVLTQSPGTLSLSPGERATLSCRASQSVSNTYLAWYHQRPGQAPRLLIYGASSRATGIPDRFSGSGSGTD
FALTISSLEPEDFAVYYCQQYSNSWTFGQGTKVEIKRTVAAPSVFIFPPSDEQLKSGTASVVCLLNNFYP
REAKVQWKVDNALQSGNSQESVTEQDSKDSTYSLSSTLTLSKADYEKHKVYACEVTHQGLSSPVTKSF
NRGEC
SEQ ID NO: 682
4F3
GAAATTGTGTTGACGCAGTCTCCAGGCACCCTGTCTTTGTCTCCAGGGGAAAGAGCCACCCTCTCCT
GCAGGGCCAGTCAGAGTGTTAGCAGCAGCTACTTAGCCTGGTACCAGCAGAAACCTGGCCAGGCT
CCCAGGCTCCTCATCTATGGTGCATCCAGCAGGGCCACTGGCATCCCAGACAGGTTCAGTGGCAGT
GGGTCTGGGACAGACTTCACTCTCACCATCAGCAGACTGGAACCTGAGGATTTTGCAGTGTATTAC
TGTCAGCAGTATGGTAGCTCGTGGACGTTCGGCCAAGGGACCAAGGTGGAAATCAAACGTACGGT
GGCTGCACCATCTGTCTTCATCTTCCCGCCATCTGATGAGCAGTTGAAATCTGGAACTGCCTCTGTT
GTGTGCCTGCTGAATAACTTCTATCCCAGAGAGGCCAAAGTACAGTGGAAGGTGGATAACGCCCTC
CAATCGGGTAACTCCCAGGAGAGTGTCACAGAGCAGGACAGCAAGGACAGCACCTACAGCCTCAG
CAGCACCCTGACGCTGAGCAAAGCAGACTACGAGAAACACAAAGTCTACGCCTGCGAAGTCACCC
ATCAGGGCCTGAGCTCGCCCGTCACAAAGAGCTTCAACAGGGGAGAGTGTTGA
SEQ ID NO: 683
EIVLTQSPGTLSLSPGERATLSCRASQSVSSSYLAWYQQKPGQAPRLLIYGASSRATGIPDRFSGSGSGTD
FTLTISRLEPEDFAVYYCQQYGSSWTFGQGTKVEIKRTVAAPSVFIFPPSDEQLKSGTASVVCLLNNFYP
REAKVQWKVDNALQSGNSQESVTEQDSKDSTYSLSSTLTLSKADYEKHKVYACEVTHQGLSSPVTKSF
NRGEC
SEQ ID NO: 684
4F7
CAGTCTGTGCTGACGCAGCCGCCCTCAGTGTCTGGGGCCCCAGGGCAGAGGGTCACCATCTCCTGC
ACTGGGAGCAGCTCCAATATCGGGACAGGTTATGATGTACACTGGTATCAGCAGCTTCCAGGAACA
GCCCCCAAACTCCTCATCCATGGTAACAGCAATCGGCCCTCAGGGGTCCCTGACCGATTCTCTGGC
TCCAAGTCTGGCACCTCAGCCTCCCTGGCCATCACTGGGCTCCAGGCTGAGGATGAGGCTGATTAT
TACTGCCAGTCCTATGACAGCAGTCTGAGTGGTTGGGTGTTCGGCGGAGGGACCAGGTTGACCGTC
CTAGGTCAGCCCAAGGCCAACCCCACTGTCACTCTGTTCCCGCCCTCCTCTGAGGAGCTCCAAGCC
AACAAGGCCACACTAGTGTGTCTGATCAGTGACTTCTACCCGGGAGCTGTGACAGTGGCCTGGAAG
GCAGATGGCAGCCCCGTCAAGGCGGGAGTGGAGACCACCAAACCCTCCAAACAGAGCAACAACAA
GTACGCGGCCAGCAGCTACCTGAGCCTGACGCCCGAGCAGTGGAAGTCCCACAGAAGCTACAGCT
GCCAGGTCACGCATGAAGGGAGCACCGTGGAGAAGACAGTGGCCCCTACAGAATGTTCATGA
SEQ ID NO: 685
QSVLTQPPSVSGAPGQRVTISCTGSSSNIGTGYDVHWYQQLPGTAPKLLIHGNSNRPSGVPDRFSGSKSG
TSASLAITGLQAEDEADYYCQSYDSSLSGWVFGGGTRLTVLGQPKANPTVTLFPPSSEELQANKATLVC
LISDFYPGAVTVAWKADGSPVKAGVETTKPSKQSNNKYAASSYLSLTPEQWKSHRSYSCQVTHEGSTV
EKTVAPTECS
SEQ ID NO: 686
16A4
GAAATTGTGTTGACGCAGTCTCCAGGCACCCTGTCTTTGTCTCCAGGGGAAAGAGCCACCCTCTCCT
GCAGGGCCAGTCAGAGTGTTAGCAGCAGTTATTTAGCCTGGTACCAGCAGAAACCTGGCCAGGCTC
CCAGGCTCCTCATCTATGGTACATCCAGCAGGGCCACTGGCATCCCAGACAGGTTCAGTGGCAGTG
GGTCTGGGACAGACTTCACTCTCACCATCAGCAGACTGGAGCCTGAAGATTTTGCAGTGTATTATT
GTCAGCAGTACGGTAGCTCACCTTTCACTTTCGGCGGAGGGACCAAGGTGGAGATCAAACGAACTG
TGGCTGCACCATCTGTCTTCATCTTCCCGCCATCTGATGAGCAGTTGAAATCTGGTACCGCCTCTGT
TGTGTGCCTGCTGAATAACTTCTATCCCAGAGAGGCCAAAGTACAGTGGAAGGTGGATAACGCCCT
CCAATCGGGTAACTCCCAGGAGAGTGTCACAGAGCAGGACAGCAAGGACAGCACCTACAGCCTCA
GCAGCACCCTGACGCTGAGCAAAGCAGACTACGAGAAACACAAAGTCTACGCCTGCGAAGTCACC
CATCAGGGCCTGAGCTCGCCCGTCACAAAGAGCTTCAACAGGGGAGAGTGTTGA
SEQ ID NO: 687
EIVLTQSPGTLSLSPGERATLSCRASQSVSSSYLAWYQQKPGQAPRLLIYGTSSRATGIPDRFSGSGSGTD
FTLTISRLEPEDFAVYYCQQYGSSPFTFGGGTKVEIKRTVAAPSVFIFPPSDEQLKSGTASVVCLLNNFYP
REAKVQWKVDNALQSGNSQESVTEQDSKDSTYSLSSTLTLSKADYEKHKVYACEVTHQGLSSPVTKSF
NRGEC
SEQ ID NO: 688
16C1
GAAATTGTGTTGACGCAGTCTCCAGGCACCCTGTCTTTGTCTCCAGGGGAAAGAGCCACCCTCTCCT
GCAGGGCCAGCCAGAGTGTTAGCAGCAGCTACTTAGCCTGGTACCAGCAGAAACCTGGCCAGGCT
CCCAGGCTCCTCATCTTTGGTGCATCCAGCAGGGCCACTGGCATCCCAGACAGGTTCAGTGGCAGT
GGGTCTGGGACAGACTTCACTCTCACCATCAGCGGACTGGAGCCTGAAGATTTTGCAGTGTATCAC
TGTCAGCAGTATGGTAACTCACCGCTCACTTTCGGCGGAGGGACCAAGGTGGAGATCAAACGAACT
GTGGCTGCACCATCTGTCTTCATCTTCCCGCCATCTGATGAGCAGTTGAAATCTGGTACCGCCTCTG
TTGTGTGCCTGCTGAATAACTTCTATCCCAGAGAGGCCAAAGTACAGTGGAAGGTGGATAACGCCC
TCCAATCGGGTAACTCCCAGGAGAGTGTCACAGAGCAGGACAGCAAGGACAGCACCTACAGCCTC
AGCAGCACCCTGACGCTGAGCAAAGCAGACTACGAGAAACACAAAGTCTACGCCTGCGAAGTCAC
CCATCAGGGCCTGAGCTCGCCCGTCACAAAGAGCTTCAACAGGGGAGAGTGTTGA
SEQ ID NO: 689
EIVLTQSPGTLSLSPGERATLSCRASQSVSSSYLAWYQQKPGQAPRLLIFGASSRATGIPDRFSGSGSGTD
FTLTISGLEPEDFAVYHCQQYGNSPLTFGGGTKVEIKRTVAAPSVFIFPPSDEQLKSGTASVVCLLNNFYP
REAKVQWKVDNALQSGNSQESVTEQDSKDSTYSLSSTLTLSKADYEKHKVYACEVTHQGLSSPVTKSF
NRGEC
SEQ ID NO: 690
17H8
GACATTGTATTGACGCAGTCTCCAGGCACCCTGTCTTTGTCTCCAGGGGAAAGAGCCACCCTCTCCT
GCAGGGCCAGTCAGAGTGTTGCCGGCAGCTACCTAGCCTGGTACCAGCAGAAACCTGGCCAGGCT
CCCAGGCTCCTCATCTCTGGTGCATCCAGCAGGGCCACTGGCATCCCAGACAGGTTCAGTGGCAGT
GGGTCTGGGACAGACTTCACTCTCACCATCAGCAGACTGGAGCCTGAAGATTTTGCAGTGTATTAC
TGTCAGCAGTATGGTAAATCACCGATCACCTTCGGCCAAGGGACACGACTGGAGATGAAAGGAAC
TGTGGCTGCACCATCTGTCTTCATCTTCCCGCCATCTGATGAGCAGTTGAAATCTGGTACCGCCTCT
GTTGTGTGCCTGCTGAATAACTTCTATCCCAGAGAGGCCAAAGTACAGTGGAAGGTGGATAACGCC
CTCCAATCGGGTAACTCCCAGGAGAGTGTCACAGAGCAGGACAGCAAGGACAGCACCTACAGCCT
CAGCAGCACCCTGACGCTGAGCAAAGCAGACTACGAGAAACACAAAGTCTACGCCTGCGAAGTCA
CCCATCAGGGCCTGAGCTCGCCCGTCACAAAGAGCTTCAACAGGGGAGAGTGTTGA
SEQ ID NO: 691
DIVLTQSPGTLSLSPGERATLSCRASQSVAGSYLAWYQQKPGQAPRLLISGASSRATGIPDRFSGSGSGT
DFTLTISRLEPEDFAVYYCQQYGKSPITFGQGTRLEMKGTVAAPSVFIFPPSDEQLKSGTASVVCLLNNF
YPREAKVQWKVDNALQSGNSQESVTEQDSKDSTYSLSSTLTLSKADYEKHKVYACEVTHQGLSSPVTK
SFNRGEC
SEQ ID NO: 692
19B5
CAGTCTGCGCTGACTCAGCCACCCTCAACGACTGGGACCCCCGGGCAGAGGGTCACCATCTCTTGT
TCTGGAAGCAGGTCCAACATCGGAAGCAATTTTGTAAACTGGTACAAGCAGCTCCCAGGAACGGC
CCCCAAAGTCCTCATCTATACTAATAATCAGCGGCCCTCAGGGGTCCCTGACCGATTCTCTGGCTCC
AAGTCTGGCACCTCAGCCTCCCTGGCCATCAGTGGGCTCCAGTCTGAGGATGAGTCTGATTATTACT
GCGCAACATGGGATGACAGTATGAATGGTTGGGTGTTCGGCGGAGGGACCAAACTGACCGTCCTA
GGTCAGCCCAAGGCTGCCCCCTCGGTCACTCTGTTCCCACCCTCCTCTGAGGAGCTTCAAGCCAAC
AAGGCCACACTGGTGTGTCTCATAAGTGACTTCTACCCGGGAGCCGTGACAGTGGCCTGGAAGGCA
GATAGCAGCCCCGTCAAGGCGGGAGTGGAGACCACCACACCCTCCAAACAAAGCAACAACAAGTA
CGCGGCCAGCAGCTATCTGAGCCTGACGCCTGAGCAGTGGAAGTCCCACAGAAGCTACAGCTGCC
AGGTCACGCATGAAGGGAGCACCGTGGAGAAGACAGTGGCCCCTACAGAATGTTCATGA
SEQ ID NO: 693
QSALTQPPSTTGTPGQRVTISCSGSRSNIGSNFVNWYKQLPGTAPKVLIYTNNQRPSGVPDRFSGSKSGTS
ASLAISGLQSEDESDYYCATWDDSMNGWVFGGGTKLTVLGQPKAAPSVTLFPPSSEELQANKATLVCLI
SDFYPGAVTVAWKADSSPVKAGVETTTPSKQSNNKYAASSYLSLTPEQWKSHRSYSCQVTHEGSTVEK
TVAPTECS
SEQ ID NO: 694
20D3
CAGTCTGCGCTGACTCAGCCACCCTCAGCGACTGGGACCCCCGGGCAGAGGGTCACCATCTCTTGT
TCTGGAAGCAGCTCCAACATCGGAAGCAATTTTGTAAACTGGTACAAGCAGCTCCCAGGAACGGCC
CCCAAAGTCCTCATCTATACTAATAATCAGCGGCCCTCAGGGGTCCCTGACCGATTCTCTGGCTCCA
AGTCTGGCACCTCAGCCTCCCTGGCCATCAGTGGGCTCCAGTCTGAGGATGAGTCTGATTATTACTG
TGCAACATGGGATGACAGCCTGAATGGTTGGGTGTTCGGCGGAGGGACCAAGCTGACCGTCCTAG
GTCAGCCCAAGGCTGCCCCCTCGGTCACTCTGTTCCCACCCTCCTCTGAGGAGCTTCAAGCCAACA
AGGCCACACTGGTGTGTCTCATAAGTGACTTCTACCCGGGAGCCGTGACAGTGGCCTGGAAGGCAG
ATAGCAGCCCCGTCAAGGCGGGAGTGGAGACCACCACACCCTCCAAACAAAGCAACAACAAGTAC
GCGGCCAGCAGCTATCTGAGCCTGACGCCTGAGCAGTGGAAGTCCCACAGAAGCTACAGCTGCCA
GGTCACGCATGAAGGGAGCACCGTGGAGAAGACAGTGGCCCCTACAGAATGTTCATGA
SEQ ID NO: 695
QSALTQPPSATGTPGQRVTISCSGSSSNIGSNFVNWYKQLPGTAPKVLIYTNNQRPSGVPDRFSGSKSGTS
ASLAISGLQSEDESDYYCATWDDSLNGWVFGGGTKLTVLGQPKAAPSVTLFPPSSEELQANKATLVCLI
SDFYPGAVTVAWKADSSPVKAGVETTTPSKQSNNKYAASSYLSLTPEQWKSHRSYSCQVTHEGSTVEK
TVAPTECS
SEQ ID NO: 696
22D1
CAGTCTGCGCTGACTCAGCCACCCTCAGCGACTGGGACCCCCGGGCAGAGGGTCACCATCTCTTGT
TCTGGAAGCAGCTCCAACATCGGAAGCAATTTTGTAAACTGGTACAAGCAGCTCCCAGGAACGGCC
CCCAAAGTCCTCATCTATACTAATAATCAGCGGCCCTCAGGGGTCCCTGACCGATTCTCTGGCTCCA
AGTCTGGCACCTCAGCCTCCCTGGCCATCAGTGGGCTCCAGTCTGAGGATGAGTCTGATTATTACTG
TGCAACATGGGATGACAGTATGAATGGTTGGGTGTTCGGCGGAGGGACCAAGCTGACCGTCCTAG
GTCAGCCCAAGGCTGCCCCCTCGGTCACTCTGTTCCCACCCTCCTCTGAGGAGCTTCAAGCCAACA
AGGCCACACTGGTGTGTCTCATAAGTGACTTCTACCCGGGAGCCGTGACAGTGGCCTGGAAGGCAG
ATAGCAGCCCCGTCAAGGCGGGAGTGGAGACCACCACACCCTCCAAACAAAGCAACAACAAGTAC
GCGGCCAGCAGCTATCTGAGCCTGACGCCTGAGCAGTGGAAGTCCCACAGAAGCTACAGCTGCCA
GGTCACGCATGAAGGGAGCACCGTGGAGAAGACAGTGGCCCCTACAGAATGTTCATGA
SEQ ID NO: 697
QSALTQPPSATGTPGQRVTISCSGSSSNIGSNFVNWYKQLPGTAPKVLIYTNNQRPSGVPDRFSGSKSGTS
ASLAISGLQSEDESDYYCATWDDSMNGWVFGGGTKLTVLGQPKAAPSVTLFPPSSEELQANKATLVCLI
SDFYPGAVTVAWKADSSPVKAGVETTTPSKQSNNKYAASSYLSLTPEQWKSHRSYSCQVTHEGSTVEK
TVAPTECS
SEQ ID NO: 698
22G10
GAAATAGTGATGACGCAGTCTCCAGTCACCCTGTCTCTGTCTCTAGGGGAAAGAGCCACCCTCTCC
TGCAGGGCCAGTCAGAGTATTAGCAGCAACTTAGCCTGGTTCCAGCAGAAACCTGGCCAGGCTCCC
AGACTCCTCATCTATGGTGCATTTACCAGGGCCACTGGTATCCCAGCCAGGGTCAGTGGCAGTGGG
TCTGGGACAGAGTTCACTCTCACCATCAGCAGCCTGCAGTCTGAAGATTTTGCAGTTTATTACTGTC
AGCAGTATAATTACTGGCCGCTCACTTTCGGCGGAGGGACCAAGGTGGAGATCAAGCGAACTGTG
GCTGCACCATCTGTCTTCATCTTCCCGCCATCTGATGAGCAGTTGAAATCTGGTACCGCCTCTGTTG
TGTGCCTGCTGAATAACTTCTATCCCAGAGAGGCCAAAGTACAGTGGAAGGTGGATAACGCCCTCC
AATCGGGTAACTCCCAGGAGAGTGTCACAGAGCAGGACAGCAAGGACAGCACCTACAGCCTCAGC
AGCACCCTGACGCTGAGCAAAGCAGACTACGAGAAACACAAAGTCTACGCCTGCGAAGTCACCCA
TCAGGGCCTGAGCTCGCCCGTCACAAAGAGCTTCAACAGGGGAGAGTGTTGA
SEQ ID NO: 699
EIVMTQSPVTLSLSLGERATLSCRASQSISSNLAWFQQKPGQAPRLLIYGAFTRATGIPARVSGSGSGTEF
TLTISSLQSEDFAVYYCQQYNYWPLTFGGGTKVEIKRTVAAPSVFIFPPSDEQLKSGTASVVCLLNNFYP
REAKVQWKVDNALQSGNSQESVTEQDSKDSTYSLSSTLTLSKADYEKHKVYACEVTHQGLSSPVTKSF
NRGEC
SEQ ID NO: 700
23A10
TCCTATGAGCTGACTCAGCCACCCTCAGTGTCCGTGTCCCCAGGACAGACAGCCAGCATCACCTGC
TCTGGAGATAGATTGGGGGAGAAATATGTTTGCTGGTATCAGCAGAAGCCAGGCCAGTCCCCTATA
CTGGTCATCTATCAAGATAATAAGTGGCCCTCAGGGATCCCTGAGCGATTCTCTGGCTCCAACTCTG
GGAACACAGCCACTCTGACCATCAGCGGGACCCAGGCTATGGATGAGGCTGACTATTACTGTCAGG
CGTGGGACAGCAGCACTGTGGTATTCGGCGGGGGGACCAAGCTGACCGTCCTAGGTCAGCCCAAG
GCTGCCCCCTCGGTCACTCTGTTCCCACCCTCCTCTGAGGAGCTTCAAGCCAACAAGGCCACACTG
GTGTGTCTCATAAGTGACTTCTACCCGGGAGCCGTGACAGTGGCCTGGAAGGCAGATAGCAGCCCC
GTCAAGGCGGGAGTGGAGACCACCACACCCTCCAAACAAAGCAACAACAAGTACGCGGCCAGCAG
CTATCTGAGCCTGACGCCTGAGCAGTGGAAGTCCCACAGAAGCTACAGCTGCCAGGTCACGCATGA
AGGGAGCACCGTGGAGAAGACAGTGGCCCCTACAGAATGTTCATGA
SEQ ID NO: 701
SYELTQPPSVSVSPGQTASITCSGDRLGEKYVCWYQQKPGQSPILVIYQDNKWPSGIPERFSGSNSGNTA
TLTISGTQAMDEADYYCQAWDSSTVVFGGGTKLTVLGQPKAAPSVTLFPPSSEELQANKATLVCLISDF
YPGAVTVAWKADSSPVKAGVETTTPSKQSNNKYAASSYLSLTPEQWKSHRSYSCQVTHEGSTVEKTV
APTECS
SEQ ID NO: 702
25F8
CAGTCTGCGCTGACTCAGCCACCCTCAGCGACTGGGACCCCCGGGCAGAGGGTCACCATCTCTTGT
TCTGGAAGCAGCTCCAACATCGGAAGGAATTTTGTAAACTGGTATAAGCAGCTCCCAGGAACGGCC
CCCAAAGTCCTCATTTATACTAATAATCAGCGGCCCTCAGGGGTCCCTGACCGATTCTCTGGCTCCA
AGTCTGGCACCTCAGCCTCCCTGGCCATCAGTGGGCTCCAGTCTGAGGATGAGTCTGATTATTACTG
TGCAGCATGGGATGACAGCCTGAATGGTTGGGTGTTCGGCGGAGGGACCAAGCTGACCGTCCTAG
GTCAGCCCAAGGCTGCCCCCTCGGTCACTCTGTTCCCACCCTCCTCTGAGGAGCTTCAAGCCAACA
AGGCCACACTGGTGTGTCTCATAAGTGACTTCTACCCGGGAGCCGTGACAGTGGCCTGGAAGGCAG
ATAGCAGCCCCGTCAAGGCGGGAGTGGAGACCACCACACCCTCCAAACAAAGCAACAACAAGTAC
GCGGCCAGCAGCTATCTGAGCCTGACGCCTGAGCAGTGGAAGTCCCACAGAAGCTACAGCTGCCA
GGTCACGCATGAAGGGAGCACCGTGGAGAAGACAGTGGCCCCTACAGAATGTTCATGA
SEQ ID NO: 703
QSALTQPPSATGTPGQRVTISCSGSSSNIGRNFVNWYKQLPGTAPKVLIYTNNQRPSGVPDRFSGSKSGT
SASLAISGLQSEDESDYYCAAWDDSLNGWVFGGGTKLTVLGQPKAAPSVTLFPPSSEELQANKATLVC
LISDFYPGAVTVAWKADSSPVKAGVETTTPSKQSNNKYAASSYLSLTPEQWKSHRSYSCQVTHEGSTV
EKTVAPTECS
SEQ ID NO: 704
25G10
GAAATTGTGTTGACGCAGTCTCCAGGCACCCTGTCTTTGTCTCCAGGGGAAAGAGCCACCCTCTCCT
GCAGGGCCAGTCAGAGTGTTAGCAGCAGCTACTTAGCCTGGTACCAGCAGAAACCTGGCCAGGCT
CCCAGGCTCCTCATCTTTGGTGCATCCAGCAGGGCCACTGGCATCCCAGACAGGTTCAGTGGCAGT
GGGTCTGGGACAGACTTCACTCTCACCATCAGCAGACTGGAGCCTGAAGATTTTGCAGTGTATCAC
TGTCAGCAGTATGGTAACTCACCGCTCACTTTCGGCGGAGGGACCAAGGTGGAGATCAAACGAACT
GTGGCTGCACCATCTGTCTTCATCTTCCCGCCATCTGATGAGCAGTTGAAATCTGGTACCGCCTCTG
TTGTGTGCCTGCTGAATAACTTCTATCCCAGAGAGGCCAAAGTACAGTGGAAGGTGGATAACGCCC
TCCAATCGGGTAACTCCCAGGAGAGTGTCACAGAGCAGGACAGCAAGGACAGCACCTACAGCCTC
AGCAGCACCCTGACGCTGAGCAAAGCAGACTACGAGAAACACAAAGTCTACGCCTGCGAAGTCAC
CCATCAGGGCCTGAGCTCGCCCGTCACAAAGAGCTTCAACAGGGGAGAGTGTTGA
SEQ ID NO: 705
EIVLTQSPGTLSLSPGERATLSCRASQSVSSSYLAWYQQKPGQAPRLLIFGASSRATGIPDRFSGSGSGTD
FTLTISRLEPEDFAVYHCQQYGNSPLTFGGGTKVEIKRTVAAPSVFIFPPSDEQLKSGTASVVCLLNNFYP
REAKVQWKVDNALQSGNSQESVTEQDSKDSTYSLSSTLTLSKADYEKHKVYACEVTHQGLSSPVTKSF
NRGEC
SEQ ID NO: 706
26D1
CACTCTGTGCTGACTCAGTCACCCTCAGCGTCTGGGACCCCCGGACAGAGGGTCACCATCTCTTGTT
CTGGAAGCCGCTCCAACATCGGAAGTAATTTTGTAAACTGGTACCAGCAGCTCCCAGGAACGGCCC
CCAAACTCCTCATCTATACTAATAATCAGCGGCCCTCAGGGGTCCCTGACCGATTCTCTGGCTCCAA
GTCTGGCACCTCAGCCTCCCTGGCCATCAGTGGGCTCCAGTCTGAGGATGAGGCTGATTATTACTGT
GCAGTATGGGATGACAGCCTGAATGGTTGGGTGTTCGGCGGAGGGACCAAGCTGACCGTCCTAGG
TCAGCCCAAGGCTGCCCCCTCGGTCACTCTGTTCCCACCCTCCTCTGAGGAGCTTCAAGCCAACAA
GGCCACACTGGTGTGTCTCATAAGTGACTTCTACCCGGGAGCCGTGACAGTGGCCTGGAAGGCAGA
TAGCAGCCCCGTCAAGGCGGGAGTGGAGACCACCACACCCTCCAAACAAAGCAACAACAAGTACG
CGGCCAGCAGCTATCTGAGCCTGACGCCTGAGCAGTGGAAGTCCCACAGAAGCTACAGCTGCCAG
GTCACGCATGAAGGGAGCACCGTGGAGAAGACAGTGGCCCCTACAGAATGTTCATGA
SEQ ID NO: 707
HSVLTQSPSASGTPGQRVTISCSGSRSNIGSNFVNWYQQLPGTAPKLLIYTNNQRPSGVPDRFSGSKSGTS
ASLAISGLQSEDEADYYCAVWDDSLNGWVFGGGTKLTVLGQPKAAPSVTLFPPSSEELQANKATLVCLI
SDFYPGAVTVAWKADSSPVKAGVETTTPSKQSNNKYAASSYLSLTPEQWKSHRSYSCQVTHEGSTVEK
TVAPTECS
SEQ ID NO: 708
26F12
CAGTCTGTGCTGACTCAGTCACCCTCAGCGTCTGGGACCCCCGGGCAGAAGGTCACCATCTCTTGTT
CTGGAAGCCGCTCCAACATCGGAAGTAATTTTGTAAACTGGTACCAGCAGCTCCCAGGAACGGCCC
CCAAACTCCTCATCTATACTAATTATCAGCGGCCCTCAGGGGTCCCTGACCGATTCTCTGGCTCCAA
GTCTGGCACCTCAGCCTCCCTGGCCATCAGTGGGCTCCAGTCTGAGGATGAGGCTGATTATTACTGT
GCAGTATGGGATGACAGCCTGAATGGTTGGGTGTTCGGCGGAGGGACCAAGCTGACCGTCCTAGG
TCAGCCCAAGGCTGCCCCCTCGGTCACTCTGTTCCCACCCTCCTCTGAGGAGCTTCAAGCCAACAA
GGCCACACTGGTGTGTCTCATAAGTGACTTCTACCCGGGAGCCGTGACAGTGGCCTGGAAGGCAGA
TAGCAGCCCCGTCAAGGCGGGAGTGGAGACCACCACACCCTCCAAACAAAGCAACAACAAGTACG
CGGCCAGCAGCTATCTGAGCCTGACGCCTGAGCAGTGGAAGTCCCACAGAAGCTACAGCTGCCAG
GTCACGCATGAAGGGAGCACCGTGGAGAAGACAGTGGCCCCTACAGAATGTTCATGA
SEQ ID NO: 709
QSVLTQSPSASGTPGQKVTISCSGSRSNIGSNFVNWYQQLPGTAPKLLIYTNYQRPSGVPDRFSGSKSGTS
ASLAISGLQSEDEADYYCAVWDDSLNGWVFGGGTKLTVLGQPKAAPSVTLFPPSSEELQANKATLVCLI
SDFYPGAVTVAWKADSSPVKAGVETTTPSKQSNNKYAASSYLSLTPEQWKSHRSYSCQVTHEGSTVEK
TVAPTECS
SEQ ID NO: 710

TABLE IIIc
Heavy Chain Variable and Contant Region Polynucleotide and Amino
acid Sequences

13586_HC [hu anti-<huCDH19> 4F3 VH]::huIgG1z
QVQLVESGGGVVQPGRSLRLSCAASGFSFSSYDMDWVRQTPGKGLEWVAVIWYDGSNKYYADSVRG
RFTISRDNSKNTLFLQMNSLRVEDTAVYYCARETGEGWYFDLWGRGTLVTVSSASTKGPSVFPLAPSSK
STSGGTAALGCLVKDYFPEPVTVSWNSGALTSGVHTFPAVLQSSGLYSLSSVVTVPSSSLGTQTYICNVN
HKPSNTKVDKKVEPKSCDKTHTCPPCPAPELLGGPSVFLFPPKPKDTLMISRTPEVTCVVVDVSHEDPEV
KFNWYVDGVEVHNAKTKPREEQYNSTYRVVSVLTVLHQDWLNGKEYKCKVSNKALPAPIEKTISKAK
GQPREPQVYTLPPSREEMTKNQVSLTCLVKGFYPSDIAVEWESNGQPENNYKTTPPVLDSDGSFFLYSK
LTVDKSRWQQGNVFSCSVMHEALHNHYTQKSLSLSPGK
SEQ ID NO: 711
13589_HC [hu anti-<huCDH19> 4A9 VH]::huIgG1z
QVQLQESGPGLVKPSETLSLTCTVSGGSISGYYWSWIRQPPGKGLEWFAYFSYSGSTNYNPSLKSRVTLS
VDTSKNQFSLKLSSVTAADTAVYYCARNWAFHFDFWGQGTLVTVSSASTKGPSVFPLAPSSKSTSGGT
AALGCLVKDYFPEPVTVSWNSGALTSGVHTFPAVLQSSGLYSLSSVVTVPSSSLGTQTYICNVNHKPSN
TKVDKKVEPKSCDKTHTCPPCPAPELLGGPSVFLFPPKPKDTLMISRTPEVTCVVVDVSHEDPEVKFNW
YVDGVEVHNAKTKPREEQYNSTYRVVSVLTVLHQDWLNGKEYKCKVSNKALPAPIEKTISKAKGQPR
EPQVYTLPPSREEMTKNQVSLTCLVKGFYPSDIAVEWESNGQPENNYKTTPPVLDSDGSFFLYSKLTVD
KSRWQQGNVFSCSVMHEALHNHYTQKSLSLSPGK
SEQ ID NO: 712
13590_HC [hu anti-<huCDH19> 4B10 VH]::huIgG1z
QVQLVESGGGVVQPGRSLRLSCAASGFTFSSYDMHWVRQAPGKGLEWVAVISYDGTNEYYADSVKGR
FTISRDTSKNTLYLQMNSLRAEDTAVYYCARERYFDWSFDYWGQGTLVSVSSASTKGPSVFPLAPSSKS
TSGGTAALGCLVKDYFPEPVTVSWNSGALTSGVHTFPAVLQSSGLYSLSSVVTVPSSSLGTQTYICNVN
HKPSNTKVDKKVEPKSCDKTHTCPPCPAPELLGGPSVFLFPPKPKDTLMISRTPEVTCVVVDVSHEDPEV
KFNWYVDGVEVHNAKTKPREEQYNSTYRVVSVLTVLHQDWLNGKEYKCKVSNKALPAPIEKTISKAK
GQPREPQVYTLPPSREEMTKNQVSLTCLVKGFYPSDIAVEWESNGQPENNYKTTPPVLDSDGSFFLYSK
LTVDKSRWQQGNVFSCSVMHEALHNHYTQKSLSLSPGK
SEQ ID NO: 713
13874_HC [hu anti-<huCDH19> 17H8.2 VH]::huIgG1z
QVQLQESGPGLVKPSETLSLTCTVSGGSINSYYWSWIRQPPGKGLEWIGYIYYIGSTNYNPSLKSRVTISV
DTSKNQFSLKLSSVTAADTALYYCARDSRYRSGWYDAFDIWGQGTMVTVSSASTKGPSVFPLAPSSKS
TSGGTAALGCLVKDYFPEPVTVSWNSGALTSGVHTFPAVLQSSGLYSLSSVVTVPSSSLGTQTYICNVN
HKPSNTKVDKKVEPKSCDKTHTCPPCPAPELLGGPSVFLFPPKPKDTLMISRTPEVTCVVVDVSHEDPEV
KFNWYVDGVEVHNAKTKPREEQYNSTYRVVSVLTVLHQDWLNGKEYKCKVSNKALPAPIEKTISKAK
GQPREPQVYTLPPSREEMTKNQVSLTCLVKGFYPSDIAVEWESNGQPENNYKTTPPVLDSDGSFFLYSK
LTVDKSRWQQGNVFSCSVMHEALHNHYTQKSLSLSPGK
SEQ ID NO: 714
13875_HC [hu anti-<huCDH19> 16C1.1 VH]::huIgG1z
QVQLQESGPGLVKPSETLSLTCTVSGGSISGYYWSWIRQPPGKGLEWIGYIYYIGSTNYNPSLKSRVTMS
IDTSKNQFSLTLSSLTAADTAVYFCARDGSSGWYRWFDPWGQGTLVTVSSASTKGPSVFPLAPSSKSTS
GGTAALGCLVKDYFPEPVTVSWNSGALTSGVHTFPAVLQSSGLYSLSSVVTVPSSSLGTQTYICNVNHK
PSNTKVDKKVEPKSCDKTHTCPPCPAPELLGGPSVFLFPPKPKDTLMISRTPEVTCVVVDVSHEDPEVKF
NWYVDGVEVHNAKTKPREEQYNSTYRVVSVLTVLHQDWLNGKEYKCKVSNKALPAPIEKTISKAKGQ
PREPQVYTLPPSREEMTKNQVSLTCLVKGFYPSDIAVEWESNGQPENNYKTTPPVLDSDGSFFLYSKLT
VDKSRWQQGNVFSCSVMHEALHNHYTQKSLSLSPGK
SEQ ID NO: 715
13876_HC [hu anti-<huCDH19> 16A4.1 VH]::huIgG1z
QVQLQESGPGLAKPSETLSLTCTVSGDSITSYYWSWIRQPPGKGLEWIGYIYYSGSTNYNPSLKSRVTISV
DTSKNQFSLKLSSVTAADTAVYYCARDQRRIAAAGTHFYGMDVWGQGTTVTVSSASTKGPSVFPLAPS
SKSTSGGTAALGCLVKDYFPEPVTVSWNSGALTSGVHTFPAVLQSSGLYSLSSVVTVPSSSLGTQTYICN
VNHKPSNTKVDKKVEPKSCDKTHTCPPCPAPELLGGPSVFLFPPKPKDTLMISRTPEVTCVVVDVSHEDP
EVKFNWYVDGVEVHNAKTKPREEQYNSTYRVVSVLTVLHQDWLNGKEYKCKVSNKALPAPIEKTISK
AKGQPREPQVYTLPPSREEMTKNQVSLTCLVKGFYPSDIAVEWESNGQPENNYKTTPPVLDSDGSFFLY
SKLTVDKSRWQQGNVFSCSVMHEALHNHYTQKSLSLSPGK
SEQ ID NO: 716
13877_HC [hu anti-<huCDH19> 22G10.1 VH]::huIgG1z
EVQLLESGGGLVQPGGSLRLSCAASGFTFSSYAMNWVRQAPGKGLEWVSTISGGGANTYYADSVKGR
FTISSDNSKSTLYLQMNSLRAADTAVYHCAKGGMGGYYYGMDVWGQGTTVTVSSASTKGPSVFPLAP
SSKSTSGGTAALGCLVKDYFPEPVTVSWNSGALTSGVHTFPAVLQSSGLYSLSSVVTVPSSSLGTQTYIC
NVNHKPSNTKVDKKVEPKSCDKTHTCPPCPAPELLGGPSVFLFPPKPKDTLMISRTPEVTCVVVDVSHE
DPEVKFNWYVDGVEVHNAKTKPREEQYNSTYRVVSVLTVLHQDWLNGKEYKCKVSNKALPAPIEKTI
SKAKGQPREPQVYTLPPSREEMTKNQVSLTCLVKGFYPSDIAVEWESNGQPENNYKTTPPVLDSDGSFF
LYSKLTVDKSRWQQGNVFSCSVMHEALHNHYTQKSLSLSPGK
SEQ ID NO: 717
13878_HC [hu anti-<huCDH19> 20D3.1 VH]::huIgG1z
QVQLVQSGAEVKKPGASVKVSCKVSGYTFTSYFIHWVRQAPGQGLEWMGIINPISVSTSYAQKFQGRV
TMTRDTSTSTVFMELSSLRSEDTAVYYCARGGIQLWLHFDYWGQGTLVTVSSASTKGPSVFPLAPSSKS
TSGGTAALGCLVKDYFPEPVTVSWNSGALTSGVHTFPAVLQSSGLYSLSSVVTVPSSSLGTQTYICNVN
HKPSNTKVDKKVEPKSCDKTHTCPPCPAPELLGGPSVFLFPPKPKDTLMISRTPEVTCVVVDVSHEDPEV
KFNWYVDGVEVHNAKTKPREEQYNSTYRVVSVLTVLHQDWLNGKEYKCKVSNKALPAPIEKTISKAK
GQPREPQVYTLPPSREEMTKNQVSLTCLVKGFYPSDIAVEWESNGQPENNYKTTPPVLDSDGSFFLYSK
LTVDKSRWQQGNVFSCSVMHEALHNHYTQKSLSLSPGK
SEQ ID NO: 718
13879_HC [hu anti-<huCDH19> 22D1.1 VH]::huIgG1z
QVQLVQSGAEVKKPGASVRVSCKVSGYTFTSYFIHWVRQAPGQGLEWMGIINPISVSTSYAQKFQGRV
TMTRDTSTSTVFMELSSLRSEDTAVYYCARGGIQLWLHLDYWGQGTLVTVSSASTKGPSVFPLAPSSKS
TSGGTAALGCLVKDYFPEPVTVSWNSGALTSGVHTFPAVLQSSGLYSLSSVVTVPSSSLGTQTYICNVN
HKPSNTKVDKKVEPKSCDKTHTCPPCPAPELLGGPSVFLFPPKPKDTLMISRTPEVTCVVVDVSHEDPEV
KFNWYVDGVEVHNAKTKPREEQYNSTYRVVSVLTVLHQDWLNGKEYKCKVSNKALPAPIEKTISKAK
GQPREPQVYTLPPSREEMTKNQVSLTCLVKGFYPSDIAVEWESNGQPENNYKTTPPVLDSDGSFFLYSK
LTVDKSRWQQGNVFSCSVMHEALHNHYTQKSLSLSPGK
SEQ ID NO: 719
13880_HC [hu anti-<huCDH19> 25F8.1 VH]::huIgG1z
QVQLVQSGAEVKKPGASVKVSCKASGYTFTSYYIHWVRQAPGQGLEWMGIINPSGGSTRYAQKFQGR
VTMTRDTSTSTVFMELSSLRSEDTAVYYCARGGIQLWLHFDYWGQGTLVTVSSASTKGPSVFPLAPSSK
STSGGTAALGCLVKDYFPEPVTVSWNSGALTSGVHTFPAVLQSSGLYSLSSVVTVPSSSLGTQTYICNVN
HKPSNTKVDKKVEPKSCDKTHTCPPCPAPELLGGPSVFLFPPKPKDTLMISRTPEVTCVVVDVSHEDPEV
KFNWYVDGVEVHNAKTKPREEQYNSTYRVVSVLTVLHQDWLNGKEYKCKVSNKALPAPIEKTISKAK
GQPREPQVYTLPPSREEMTKNQVSLTCLVKGFYPSDIAVEWESNGQPENNYKTTPPVLDSDGSFFLYSK
LTVDKSRWQQGNVFSCSVMHEALHNHYTQKSLSLSPGK
SEQ ID NO: 720
13881_HC [hu anti-<huCDH19> 26F12.1 VH]::huIgG1z
QVQLVQSGAEVKKPGASVKVSCKASRYTFTNYYMSWVRQAPGQGLEWMGIINPSGGDSTYAQKFQG
RLTMTGDTSTSTVYMELSSLRSEDTAVYYCARGGIQLWLHFDYWGQGTLVTVSSASTKGPSVFPLAPSS
KSTSGGTAALGCLVKDYFPEPVTVSWNSGALTSGVHTFPAVLQSSGLYSLSSVVTVPSSSLGTQTYICNV
NHKPSNTKVDKKVEPKSCDKTHTCPPCPAPELLGGPSVFLFPPKPKDTLMISRTPEVTCVVVDVSHEDPE
VKFNWYVDGVEVHNAKTKPREEQYNSTYRVVSVLTVLHQDWLNGKEYKCKVSNKALPAPIEKTISKA
KGQPREPQVYTLPPSREEMTKNQVSLTCLVKGFYPSDIAVEWESNGQPENNYKTTPPVLDSDGSFFLYS
KLTVDKSRWQQGNVFSCSVMHEALHNHYTQKSLSLSPGK
SEQ ID NO: 721
13882_HC [hu anti-<huCDH19> 26D1.1 VH]::huIgG1z
QVQLVQSGAEVKKPGASVKVSCKASRYTFTSYYMSWVRQAPGQGLEWMGIIHPSGGDTTYAQKFQGR
VTMTGDTSTSTVYMELSSLRSEDTAVYYCARGGIKLWLHFDYWGQGTLVTVSSASTKGPSVFPLAPSS
KSTSGGTAALGCLVKDYFPEPVTVSWNSGALTSGVHTFPAVLQSSGLYSLSSVVTVPSSSLGTQTYICNV
NHKPSNTKVDKKVEPKSCDKTHTCPPCPAPELLGGPSVFLFPPKPKDTLMISRTPEVTCVVVDVSHEDPE
VKFNWYVDGVEVHNAKTKPREEQYNSTYRVVSVLTVLHQDWLNGKEYKCKVSNKALPAPIEKTISKA
KGQPREPQVYTLPPSREEMTKNQVSLTCLVKGFYPSDIAVEWESNGQPENNYKTTPPVLDSDGSFFLYS
KLTVDKSRWQQGNVFSCSVMHEALHNHYTQKSLSLSPGK
SEQ ID NO: 722
13883_HC [hu anti-<huCDH19> 25G10.1 VH]::huIgG1z
QVQLQESGPGLVKPSETLSLTCTVSGGSISGYYWSWIRQPPGKGLEWIGYIYYIGSTNYNPSLKSRVTMS
VDTSKNQFSLKLSSVTAADTAVYYCARDGSSGWYRWFDPWGQGTLVTVSSASTKGPSVFPLAPSSKST
SGGTAALGCLVKDYFPEPVTVSWNSGALTSGVHTFPAVLQSSGLYSLSSVVTVPSSSLGTQTYICNVNH
KPSNTKVDKKVEPKSCDKTHTCPPCPAPELLGGPSVFLFPPKPKDTLMISRTPEVTCVVVDVSHEDPEVK
FNWYVDGVEVHNAKTKPREEQYNSTYRVVSVLTVLHQDWLNGKEYKCKVSNKALPAPIEKTISKAKG
QPREPQVYTLPPSREEMTKNQVSLTCLVKGFYPSDIAVEWESNGQPENNYKTTPPVLDSDGSFFLYSKL
TVDKSRWQQGNVFSCSVMHEALHNHYTQKSLSLSPGK
SEQ ID NO: 723
13885_HC [hu anti-<huCDH19> 19B5.1 VH]::huIgG1z
QVQLVQSGAEVKKPGASVKVSCKVSGYTFTSYFIHWVRQAPGQGLEWMGIINPISVSTSYAQKFQGRV
TMTRDTSTSTVFMELSSLRSEDTAVYYCARGGIQLWLHLDYWGQGTLVTVSSASTKGPSVFPLAPSSKS
TSGGTAALGCLVKDYFPEPVTVSWNSGALTSGVHTFPAVLQSSGLYSLSSVVTVPSSSLGTQTYICNVN
HKPSNTKVDKKVEPKSCDKTHTCPPCPAPELLGGPSVFLFPPKPKDTLMISRTPEVTCVVVDVSHEDPEV
KFNWYVDGVEVHNAKTKPREEQYNSTYRVVSVLTVLHQDWLNGKEYKCKVSNKALPAPIEKTISKAK
GQPREPQVYTLPPSREEMTKNQVSLTCLVKGFYPSDIAVEWESNGQPENNYKTTPPVLDSDGSFFLYSK
LTVDKSRWQQGNVFSCSVMHEALHNHYTQKSLSLSPGK
SEQ ID NO: 724
14022_HC [hu anti-<huCDH19> 4A2 VH]::huIgG1z
QVQLQESGPGLVKPSQTLSLTCTVSGGSISSSGYYWSWIRQHPGKGLEWIGYIYYTGSAYYNPSLKSRV
TISVDTSKNQFSLKLSSVTAADTAVYYCARDGSSGWYFQYWGQGTLVTVSSASTKGPSVFPLAPSSKST
SGGTAALGCLVKDYFPEPVTVSWNSGALTSGVHTFPAVLQSSGLYSLSSVVTVPSSSLGTQTYICNVNH
KPSNTKVDKKVEPKSCDKTHTCPPCPAPELLGGPSVFLFPPKPKDTLMISRTPEVTCVVVDVSHEDPEVK
FNWYVDGVEVHNAKTKPREEQYNSTYRVVSVLTVLHQDWLNGKEYKCKVSNKALPAPIEKTISKAKG
QPREPQVYTLPPSREEMTKNQVSLTCLVKGFYPSDIAVEWESNGQPENNYKTTPPVLDSDGSFFLYSKL
TVDKSRWQQGNVFSCSVMHEALHNHYTQKSLSLSPGK
SEQ ID NO: 725
14024_HC [hu anti-<huCDH19> 4A2 (1-472)(Q17E, H47P) VH]::huIgG1z
QVQLQESGPGLVKPSETLSLTCTVSGGSISSSGYYWSWIRQPPGKGLEWIGYIYYTGSAYYNPSLKSRVT
ISVDTSKNQFSLKLSSVTAADTAVYYCARDGSSGWYFQYWGQGTLVTVSSASTKGPSVFPLAPSSKSTS
GGTAALGCLVKDYFPEPVTVSWNSGALTSGVHTFPAVLQSSGLYSLSSVVTVPSSSLGTQTYICNVNHK
PSNTKVDKKVEPKSCDKTHTCPPCPAPELLGGPSVFLFPPKPKDTLMISRTPEVTCVVVDVSHEDPEVKF
NWYVDGVEVHNAKTKPREEQYNSTYRVVSVLTVLHQDWLNGKEYKCKVSNKALPAPIEKTISKAKGQ
PREPQVYTLPPSREEMTKNQVSLTCLVKGFYPSDIAVEWESNGQPENNYKTTPPVLDSDGSFFLYSKLT
VDKSRWQQGNVFSCSVMHEALHNHYTQKSLSLSPGK
SEQ ID NO: 726
14025_HC [hu anti-<huCDH19> 4A2 VH]::huIgG1z
QVQLQESGPGLVKPSQTLSLTCTVSGGSISSSGYYWSWIRQHPGKGLEWIGYIYYTGSAYYNPSLKSRV
TISVDTSKNQFSLKLSSVTAADTAVYYCARDGSSGWYFQYWGQGTLVTVSSASTKGPSVFPLAPSSKST
SGGTAALGCLVKDYFPEPVTVSWNSGALTSGVHTFPAVLQSSGLYSLSSVVTVPSSSLGTQTYICNVNH
KPSNTKVDKKVEPKSCDKTHTCPPCPAPELLGGPSVFLFPPKPKDTLMISRTPEVTCVVVDVSHEDPEVK
FNWYVDGVEVHNAKTKPREEQYNSTYRVVSVLTVLHQDWLNGKEYKCKVSNKALPAPIEKTISKAKG
QPREPQVYTLPPSREEMTKNQVSLTCLVKGFYPSDIAVEWESNGQPENNYKTTPPVLDSDGSFFLYSKL
TVDKSRWQQGNVFSCSVMHEALHNHYTQKSLSLSPGK
SEQ ID NO: 727
14026_HC [hu anti-<huCDH19> 4A2 (1-472)(Q17E, H47P) VH]::huIgG1z
QVQLQESGPGLVKPSETLSLTCTVSGGSISSSGYYWSWIRQPPGKGLEWIGYIYYTGSAYYNPSLKSRVT
ISVDTSKNQFSLKLSSVTAADTAVYYCARDGSSGWYFQYWGQGTLVTVSSASTKGPSVFPLAPSSKSTS
GGTAALGCLVKDYFPEPVTVSWNSGALTSGVHTFPAVLQSSGLYSLSSVVTVPSSSLGTQTYICNVNHK
PSNTKVDKKVEPKSCDKTHTCPPCPAPELLGGPSVFLFPPKPKDTLMISRTPEVTCVVVDVSHEDPEVKF
NWYVDGVEVHNAKTKPREEQYNSTYRVVSVLTVLHQDWLNGKEYKCKVSNKALPAPIEKTISKAKGQ
PREPQVYTLPPSREEMTKNQVSLTCLVKGFYPSDIAVEWESNGQPENNYKTTPPVLDSDGSFFLYSKLT
VDKSRWQQGNVFSCSVMHEALHNHYTQKSLSLSPGK
SEQ ID NO: 728
14027_HC [hu anti-<huCDH19> 4A2 (1-472)(Q17E, H47P, D111E) VH]::huIgG1z
QVQLQESGPGLVKPSETLSLTCTVSGGSISSSGYYWSWIRQPPGKGLEWIGYIYYTGSAYYNPSLKSRVT
ISVDTSKNQFSLKLSSVTAADTAVYYCAREGSSGWYFQYWGQGTLVTVSSASTKGPSVFPLAPSSKSTS
GGTAALGCLVKDYFPEPVTVSWNSGALTSGVHTFPAVLQSSGLYSLSSVVTVPSSSLGTQTYICNVNHK
PSNTKVDKKVEPKSCDKTHTCPPCPAPELLGGPSVFLFPPKPKDTLMISRTPEVTCVVVDVSHEDPEVKF
NWYVDGVEVHNAKTKPREEQYNSTYRVVSVLTVLHQDWLNGKEYKCKVSNKALPAPIEKTISKAKGQ
PREPQVYTLPPSREEMTKNQVSLTCLVKGFYPSDIAVEWESNGQPENNYKTTPPVLDSDGSFFLYSKLT
VDKSRWQQGNVFSCSVMHEALHNHYTQKSLSLSPGK
SEQ ID NO: 729
14028_HC [hu anti-<huCDH19> 4A2 (1-472)(Q17E, H47P, D111E, W134Y)
VH]::huIgG1z
QVQLQESGPGLVKPSETLSLTCTVSGGSISSSGYYWSWIRQPPGKGLEWIGYIYYTGSAYYNPSLKSRVT
ISVDTSKNQFSLKLSSVTAADTAVYYCAREGSSGYYFQYWGQGTLVTVSSASTKGPSVFPLAPSSKSTS
GGTAALGCLVKDYFPEPVTVSWNSGALTSGVHTFPAVLQSSGLYSLSSVVTVPSSSLGTQTYICNVNHK
PSNTKVDKKVEPKSCDKTHTCPPCPAPELLGGPSVFLFPPKPKDTLMISRTPEVTCVVVDVSHEDPEVKF
NWYVDGVEVHNAKTKPREEQYNSTYRVVSVLTVLHQDWLNGKEYKCKVSNKALPAPIEKTISKAKGQ
PREPQVYTLPPSREEMTKNQVSLTCLVKGFYPSDIAVEWESNGQPENNYKTTPPVLDSDGSFFLYSKLT
VDKSRWQQGNVFSCSVMHEALHNHYTQKSLSLSPGK
SEQ ID NO: 730
14029_HC [hu anti-<huCDH19> 4A2 VH]::huIgG1z
QVQLQESGPGLVKPSQTLSLTCTVSGGSISSSGYYWSWIRQHPGKGLEWIGYIYYTGSAYYNPSLKSRV
TISVDTSKNQFSLKLSSVTAADTAVYYCARDGSSGWYFQYWGQGTLVTVSSASTKGPSVFPLAPSSKST
SGGTAALGCLVKDYFPEPVTVSWNSGALTSGVHTFPAVLQSSGLYSLSSVVTVPSSSLGTQTYICNVNH
KPSNTKVDKKVEPKSCDKTHTCPPCPAPELLGGPSVFLFPPKPKDTLMISRTPEVTCVVVDVSHEDPEVK
FNWYVDGVEVHNAKTKPREEQYNSTYRVVSVLTVLHQDWLNGKEYKCKVSNKALPAPIEKTISKAKG
QPREPQVYTLPPSREEMTKNQVSLTCLVKGFYPSDIAVEWESNGQPENNYKTTPPVLDSDGSFFLYSKL
TVDKSRWQQGNVFSCSVMHEALHNHYTQKSLSLSPGK
SEQ ID NO: 731
14030_HC [hu anti-<huCDH19> 4F3 (1-471)(R17G) VH]::huIgG1z
QVQLVESGGGVVQPGGSLRLSCAASGFSFSSYDMDWVRQTPGKGLEWVAVIWYDGSNKYYADSVRG
RFTISRDNSKNTLFLQMNSLRVEDTAVYYCARETGEGWYFDLWGRGTLVTVSSASTKGPSVFPLAPSSK
STSGGTAALGCLVKDYFPEPVTVSWNSGALTSGVHTFPAVLQSSGLYSLSSVVTVPSSSLGTQTYICNVN
HKPSNTKVDKKVEPKSCDKTHTCPPCPAPELLGGPSVFLFPPKPKDTLMISRTPEVTCVVVDVSHEDPEV
KFNWYVDGVEVHNAKTKPREEQYNSTYRVVSVLTVLHQDWLNGKEYKCKVSNKALPAPIEKTISKAK
GQPREPQVYTLPPSREEMTKNQVSLTCLVKGFYPSDIAVEWESNGQPENNYKTTPPVLDSDGSFFLYSK
LTVDKSRWQQGNVFSCSVMHEALHNHYTQKSLSLSPGK
SEQ ID NO: 732
14031_HC [hu anti-<huCDH19> 4F3 (1-471)(R17G, T47A) VH]::huIgG1z
QVQLVESGGGVVQPGGSLRLSCAASGFSFSSYDMDWVRQAPGKGLEWVAVIWYDGSNKYYADSVRG
RFTISRDNSKNTLFLQMNSLRVEDTAVYYCARETGEGWYFDLWGRGTLVTVSSASTKGPSVFPLAPSSK
STSGGTAALGCLVKDYFPEPVTVSWNSGALTSGVHTFPAVLQSSGLYSLSSVVTVPSSSLGTQTYICNVN
HKPSNTKVDKKVEPKSCDKTHTCPPCPAPELLGGPSVFLFPPKPKDTLMISRTPEVTCVVVDVSHEDPEV
KFNWYVDGVEVHNAKTKPREEQYNSTYRVVSVLTVLHQDWLNGKEYKCKVSNKALPAPIEKTISKAK
GQPREPQVYTLPPSREEMTKNQVSLTCLVKGFYPSDIAVEWESNGQPENNYKTTPPVLDSDGSFFLYSK
LTVDKSRWQQGNVFSCSVMHEALHNHYTQKSLSLSPGK
SEQ ID NO: 733
14032_HC [hu anti-<huCDH19> 4F3 (1-471)(R17G, T47A, R141Q) VH]::huIgG1z
QVQLVESGGGVVQPGGSLRLSCAASGFSFSSYDMDWVRQAPGKGLEWVAVIWYDGSNKYYADSVRG
RFTISRDNSKNTLFLQMNSLRVEDTAVYYCARETGEGWYFDLWGQGTLVTVSSASTKGPSVFPLAPSSK
STSGGTAALGCLVKDYFPEPVTVSWNSGALTSGVHTFPAVLQSSGLYSLSSVVTVPSSSLGTQTYICNVN
HKPSNTKVDKKVEPKSCDKTHTCPPCPAPELLGGPSVFLFPPKPKDTLMISRTPEVTCVVVDVSHEDPEV
KFNWYVDGVEVHNAKTKPREEQYNSTYRVVSVLTVLHQDWLNGKEYKCKVSNKALPAPIEKTISKAK
GQPREPQVYTLPPSREEMTKNQVSLTCLVKGFYPSDIAVEWESNGQPENNYKTTPPVLDSDGSFFLYSK
LTVDKSRWQQGNVFSCSVMHEALHNHYTQKSLSLSPGK
SEQ ID NO: 734
14033_HC [hu anti-<huCDH19> 4F3 (1-471)(R17G, T47A, D61E, D72E, R141Q)
VH]::huIgG1z
QVQLVESGGGVVQPGGSLRLSCAASGFSFSSYDMDWVRQAPGKGLEWVAVIWYEGSNKYYAESVRG
RFTISRDNSKNTLFLQMNSLRVEDTAVYYCARETGEGWYFDLWGQGTLVTVSSASTKGPSVFPLAPSSK
STSGGTAALGCLVKDYFPEPVTVSWNSGALTSGVHTFPAVLQSSGLYSLSSVVTVPSSSLGTQTYICNVN
HKPSNTKVDKKVEPKSCDKTHTCPPCPAPELLGGPSVFLFPPKPKDTLMISRTPEVTCVVVDVSHEDPEV
KFNWYVDGVEVHNAKTKPREEQYNSTYRVVSVLTVLHQDWLNGKEYKCKVSNKALPAPIEKTISKAK
GQPREPQVYTLPPSREEMTKNQVSLTCLVKGFYPSDIAVEWESNGQPENNYKTTPPVLDSDGSFFLYSK
LTVDKSRWQQGNVFSCSVMHEALHNHYTQKSLSLSPGK
SEQ ID NO: 735
14034_HC [hu anti-<huCDH19> 4F3 (1-471)(R17G, T47A, D61E, D72E, W134Y,
R141Q) VH]::huIgG1z
QVQLVESGGGVVQPGGSLRLSCAASGFSFSSYDMDWVRQAPGKGLEWVAVIWYEGSNKYYAESVRG
RFTISRDNSKNTLFLQMNSLRVEDTAVYYCARETGEGYYFDLWGQGTLVTVSSASTKGPSVFPLAPSSK
STSGGTAALGCLVKDYFPEPVTVSWNSGALTSGVHTFPAVLQSSGLYSLSSVVTVPSSSLGTQTYICNVN
HKPSNTKVDKKVEPKSCDKTHTCPPCPAPELLGGPSVFLFPPKPKDTLMISRTPEVTCVVVDVSHEDPEV
KFNWYVDGVEVHNAKTKPREEQYNSTYRVVSVLTVLHQDWLNGKEYKCKVSNKALPAPIEKTISKAK
GQPREPQVYTLPPSREEMTKNQVSLTCLVKGFYPSDIAVEWESNGQPENNYKTTPPVLDSDGSFFLYSK
LTVDKSRWQQGNVFSCSVMHEALHNHYTQKSLSLSPGK
SEQ ID NO: 736
14039_HC [hu anti-<huCDH19> 2G6 (1-477)(R17G, D61E, D72E, K94N) VH]::huIgG1z
QVQLVESGGGVVQPGGSLRLSCAASGFTFSSYGMHWVRQAPGKGLEWVAFIWYEGSNKYYAESVKD
RFTISRDNSKNTLYLQMNSLRAEDTAVYYCARRAGIIGTIGYYYGMDVWGQGTTVTVSSASTKGPSVFP
LAPSSKSTSGGTAALGCLVKDYFPEPVTVSWNSGALTSGVHTFPAVLQSSGLYSLSSVVTVPSSSLGTQT
YICNVNHKPSNTKVDKKVEPKSCDKTHTCPPCPAPELLGGPSVFLFPPKPKDTLMISRTPEVTCVVVDVS
HEDPEVKFNWYVDGVEVHNAKTKPREEQYNSTYRVVSVLTVLHQDWLNGKEYKCKVSNKALPAPIE
KTISKAKGQPREPQVYTLPPSREEMTKNQVSLTCLVKGFYPSDIAVEWESNGQPENNYKTTPPVLDSDG
SFFLYSKLTVDKSRWQQGNVFSCSVMHEALHNHYTQKSLSLSPGK
SEQ ID NO: 737
14040_HC [hu anti-<huCDH19> 16C1.1 VH]::huIgG1z
QVQLQESGPGLVKPSETLSLTCTVSGGSISGYYWSWIRQPPGKGLEWIGYIYYIGSTNYNPSLKSRVTMS
IDTSKNQFSLTLSSLTAADTAVYFCARDGSSGWYRWFDPWGQGTLVTVSSASTKGPSVFPLAPSSKSTS
GGTAALGCLVKDYFPEPVTVSWNSGALTSGVHTFPAVLQSSGLYSLSSVVTVPSSSLGTQTYICNVNHK
PSNTKVDKKVEPKSCDKTHTCPPCPAPELLGGPSVFLFPPKPKDTLMISRTPEVTCVVVDVSHEDPEVKF
NWYVDGVEVHNAKTKPREEQYNSTYRVVSVLTVLHQDWLNGKEYKCKVSNKALPAPIEKTISKAKGQ
PREPQVYTLPPSREEMTKNQVSLTCLVKGFYPSDIAVEWESNGQPENNYKTTPPVLDSDGSFFLYSKLT
VDKSRWQQGNVFSCSVMHEALHNHYTQKSLSLSPGK
SEQ ID NO: 738
14041_HC [hu anti-<huCDH19> 16C1.1 (1-469)(T92K) VH]::huIgG1z
QVQLQESGPGLVKPSETLSLTCTVSGGSISGYYWSWIRQPPGKGLEWIGYIYYIGSTNYNPSLKSRVTMS
IDTSKNQFSLKLSSLTAADTAVYFCARDGSSGWYRWFDPWGQGTLVTVSSASTKGPSVFPLAPSSKSTS
GGTAALGCLVKDYFPEPVTVSWNSGALTSGVHTFPAVLQSSGLYSLSSVVTVPSSSLGTQTYICNVNHK
PSNTKVDKKVEPKSCDKTHTCPPCPAPELLGGPSVFLFPPKPKDTLMISRTPEVTCVVVDVSHEDPEVKF
NWYVDGVEVHNAKTKPREEQYNSTYRVVSVLTVLHQDWLNGKEYKCKVSNKALPAPIEKTISKAKGQ
PREPQVYTLPPSREEMTKNQVSLTCLVKGFYPSDIAVEWESNGQPENNYKTTPPVLDSDGSFFLYSKLT
VDKSRWQQGNVFSCSVMHEALHNHYTQKSLSLSPGK
SEQ ID NO: 739
14042_HC [hu anti-<huCDH19> 16C1.1 (1-469)(T92K, D109E) VH]::huIgG1z
QVQLQESGPGLVKPSETLSLTCTVSGGSISGYYWSWIRQPPGKGLEWIGYIYYIGSTNYNPSLKSRVTMS
IDTSKNQFSLKLSSLTAADTAVYFCAREGSSGWYRWFDPWGQGTLVTVSSASTKGPSVFPLAPSSKSTS
GGTAALGCLVKDYFPEPVTVSWNSGALTSGVHTFPAVLQSSGLYSLSSVVTVPSSSLGTQTYICNVNHK
PSNTKVDKKVEPKSCDKTHTCPPCPAPELLGGPSVFLFPPKPKDTLMISRTPEVTCVVVDVSHEDPEVKF
NWYVDGVEVHNAKTKPREEQYNSTYRVVSVLTVLHQDWLNGKEYKCKVSNKALPAPIEKTISKAKGQ
PREPQVYTLPPSREEMTKNQVSLTCLVKGFYPSDIAVEWESNGQPENNYKTTPPVLDSDGSFFLYSKLT
VDKSRWQQGNVFSCSVMHEALHNHYTQKSLSLSPGK
SEQ ID NO: 740
14043_HC [hu anti-<huCDH19> 16C1.1 (1-469)(T92K, W132Y, W135Y) VH]::huIgG1z
QVQLQESGPGLVKPSETLSLTCTVSGGSISGYYWSWIRQPPGKGLEWIGYIYYIGSTNYNPSLKSRVTMS
IDTSKNQFSLKLSSLTAADTAVYFCARDGSSGYYRYFDPWGQGTLVTVSSASTKGPSVFPLAPSSKSTSG
GTAALGCLVKDYFPEPVTVSWNSGALTSGVHTFPAVLQSSGLYSLSSVVTVPSSSLGTQTYICNVNHKP
SNTKVDKKVEPKSCDKTHTCPPCPAPELLGGPSVFLFPPKPKDTLMISRTPEVTCVVVDVSHEDPEVKFN
WYVDGVEVHNAKTKPREEQYNSTYRVVSVLTVLHQDWLNGKEYKCKVSNKALPAPIEKTISKAKGQP
REPQVYTLPPSREEMTKNQVSLTCLVKGFYPSDIAVEWESNGQPENNYKTTPPVLDSDGSFFLYSKLTV
DKSRWQQGNVFSCSVMHEALHNHYTQKSLSLSPGK
SEQ ID NO: 741
14044_HC [hu anti-<huCDH19> 16C1.1 (1-469)(T92K) VH]::huIgG1z
QVQLQESGPGLVKPSETLSLTCTVSGGSISGYYWSWIRQPPGKGLEWIGYIYYIGSTNYNPSLKSRVTMS
IDTSKNQFSLKLSSLTAADTAVYFCARDGSSGWYRWFDPWGQGTLVTVSSASTKGPSVFPLAPSSKSTS
GGTAALGCLVKDYFPEPVTVSWNSGALTSGVHTFPAVLQSSGLYSLSSVVTVPSSSLGTQTYICNVNHK
PSNTKVDKKVEPKSCDKTHTCPPCPAPELLGGPSVFLFPPKPKDTLMISRTPEVTCVVVDVSHEDPEVKF
NWYVDGVEVHNAKTKPREEQYNSTYRVVSVLTVLHQDWLNGKEYKCKVSNKALPAPIEKTISKAKGQ
PREPQVYTLPPSREEMTKNQVSLTCLVKGFYPSDIAVEWESNGQPENNYKTTPPVLDSDGSFFLYSKLT
VDKSRWQQGNVFSCSVMHEALHNHYTQKSLSLSPGK
SEQ ID NO: 742
14045_HC [hu anti-<huCDH19> 17H8.2 VH]::huIgG1z
QVQLQESGPGLVKPSETLSLTCTVSGGSINSYYWSWIRQPPGKGLEWIGYIYYIGSTNYNPSLKSRVTISV
DTSKNQFSLKLSSVTAADTALYYCARDSRYRSGWYDAFDIWGQGTMVTVSSASTKGPSVFPLAPSSKS
TSGGTAALGCLVKDYFPEPVTVSWNSGALTSGVHTFPAVLQSSGLYSLSSVVTVPSSSLGTQTYICNVN
HKPSNTKVDKKVEPKSCDKTHTCPPCPAPELLGGPSVFLFPPKPKDTLMISRTPEVTCVVVDVSHEDPEV
KFNWYVDGVEVHNAKTKPREEQYNSTYRVVSVLTVLHQDWLNGKEYKCKVSNKALPAPIEKTISKAK
GQPREPQVYTLPPSREEMTKNQVSLTCLVKGFYPSDIAVEWESNGQPENNYKTTPPVLDSDGSFFLYSK
LTVDKSRWQQGNVFSCSVMHEALHNHYTQKSLSLSPGK
SEQ ID NO: 743
14046_HC [hu anti-<huCDH19> 17H8.2 (1-471)(D109E) VH]::huIgG1z
QVQLQESGPGLVKPSETLSLTCTVSGGSINSYYWSWIRQPPGKGLEWIGYIYYIGSTNYNPSLKSRVTISV
DTSKNQFSLKLSSVTAADTALYYCARESRYRSGWYDAFDIWGQGTMVTVSSASTKGPSVFPLAPSSKST
SGGTAALGCLVKDYFPEPVTVSWNSGALTSGVHTFPAVLQSSGLYSLSSVVTVPSSSLGTQTYICNVNH
KPSNTKVDKKVEPKSCDKTHTCPPCPAPELLGGPSVFLFPPKPKDTLMISRTPEVTCVVVDVSHEDPEVK
FNWYVDGVEVHNAKTKPREEQYNSTYRVVSVLTVLHQDWLNGKEYKCKVSNKALPAPIEKTISKAKG
QPREPQVYTLPPSREEMTKNQVSLTCLVKGFYPSDIAVEWESNGQPENNYKTTPPVLDSDGSFFLYSKL
TVDKSRWQQGNVFSCSVMHEALHNHYTQKSLSLSPGK
SEQ ID NO: 744
14047_HC [hu anti-<huCDH19> 17H8.2 (1-471)(D109E, W132Y) VH]::huIgG1z
QVQLQESGPGLVKPSETLSLTCTVSGGSINSYYWSWIRQPPGKGLEWIGYIYYIGSTNYNPSLKSRVTISV
DTSKNQFSLKLSSVTAADTALYYCARESRYRSGYYDAFDIWGQGTMVTVSSASTKGPSVFPLAPSSKST
SGGTAALGCLVKDYFPEPVTVSWNSGALTSGVHTFPAVLQSSGLYSLSSVVTVPSSSLGTQTYICNVNH
KPSNTKVDKKVEPKSCDKTHTCPPCPAPELLGGPSVFLFPPKPKDTLMISRTPEVTCVVVDVSHEDPEVK
FNWYVDGVEVHNAKTKPREEQYNSTYRVVSVLTVLHQDWLNGKEYKCKVSNKALPAPIEKTISKAKG
QPREPQVYTLPPSREEMTKNQVSLTCLVKGFYPSDIAVEWESNGQPENNYKTTPPVLDSDGSFFLYSKL
TVDKSRWQQGNVFSCSVMHEALHNHYTQKSLSLSPGK
SEQ ID NO: 745
14048_HC [hu anti-<huCDH19> 17H8.2 (1-471)(D109E) VH]::huIgG1z
QVQLQESGPGLVKPSETLSLTCTVSGGSINSYYWSWIRQPPGKGLEWIGYIYYIGSTNYNPSLKSRVTISV
DTSKNQFSLKLSSVTAADTALYYCARESRYRSGWYDAFDIWGQGTMVTVSSASTKGPSVFPLAPSSKST
SGGTAALGCLVKDYFPEPVTVSWNSGALTSGVHTFPAVLQSSGLYSLSSVVTVPSSSLGTQTYICNVNH
KPSNTKVDKKVEPKSCDKTHTCPPCPAPELLGGPSVFLFPPKPKDTLMISRTPEVTCVVVDVSHEDPEVK
FNWYVDGVEVHNAKTKPREEQYNSTYRVVSVLTVLHQDWLNGKEYKCKVSNKALPAPIEKTISKAKG
QPREPQVYTLPPSREEMTKNQVSLTCLVKGFYPSDIAVEWESNGQPENNYKTTPPVLDSDGSFFLYSKL
TVDKSRWQQGNVFSCSVMHEALHNHYTQKSLSLSPGK
SEQ ID NO: 746
14049_HC [hu anti-<huCDH19> 4F7 VH]::huIgG1z
QVQLQESGPGLVKPSETLSLTCTVSGGSISSYSWSWIRQPPGKGLEWIGYIYYSGSTNYNPSLKSRVTISL
DTSKNQFSLKLSSVTAADTAVYYCARNWAFHFDYWGQGTLVTVSSASTKGPSVFPLAPSSKSTSGGTA
ALGCLVKDYFPEPVTVSWNSGALTSGVHTFPAVLQSSGLYSLSSVVTVPSSSLGTQTYICNVNHKPSNT
KVDKKVEPKSCDKTHTCPPCPAPELLGGPSVFLFPPKPKDTLMISRTPEVTCVVVDVSHEDPEVKFNWY
VDGVEVHNAKTKPREEQYNSTYRVVSVLTVLHQDWLNGKEYKCKVSNKALPAPIEKTISKAKGQPREP
QVYTLPPSREEMTKNQVSLTCLVKGFYPSDIAVEWESNGQPENNYKTTPPVLDSDGSFFLYSKLTVDKS
RWQQGNVFSCSVMHEALHNHYTQKSLSLSPGK
SEQ ID NO: 747
14050_HC [hu anti-<huCDH19> 4F7 VH]::huIgG1z
QVQLQESGPGLVKPSETLSLTCTVSGGSISSYSWSWIRQPPGKGLEWIGYIYYSGSTNYNPSLKSRVTISL
DTSKNQFSLKLSSVTAADTAVYYCARNWAFHFDYWGQGTLVTVSSASTKGPSVFPLAPSSKSTSGGTA
ALGCLVKDYFPEPVTVSWNSGALTSGVHTFPAVLQSSGLYSLSSVVTVPSSSLGTQTYICNVNHKPSNT
KVDKKVEPKSCDKTHTCPPCPAPELLGGPSVFLFPPKPKDTLMISRTPEVTCVVVDVSHEDPEVKFNWY
VDGVEVHNAKTKPREEQYNSTYRVVSVLTVLHQDWLNGKEYKCKVSNKALPAPIEKTISKAKGQPREP
QVYTLPPSREEMTKNQVSLTCLVKGFYPSDIAVEWESNGQPENNYKTTPPVLDSDGSFFLYSKLTVDKS
RWQQGNVFSCSVMHEALHNHYTQKSLSLSPGK
SEQ ID NO: 748
14051_HC [hu anti-<huCDH19> 4F7 (1-468)(W113Y) VH]::huIgG1z
QVQLQESGPGLVKPSETLSLTCTVSGGSISSYSWSWIRQPPGKGLEWIGYIYYSGSTNYNPSLKSRVTISL
DTSKNQFSLKLSSVTAADTAVYYCARNYAFHFDYWGQGTLVTVSSASTKGPSVFPLAPSSKSTSGGTA
ALGCLVKDYFPEPVTVSWNSGALTSGVHTFPAVLQSSGLYSLSSVVTVPSSSLGTQTYICNVNHKPSNT
KVDKKVEPKSCDKTHTCPPCPAPELLGGPSVFLFPPKPKDTLMISRTPEVTCVVVDVSHEDPEVKFNWY
VDGVEVHNAKTKPREEQYNSTYRVVSVLTVLHQDWLNGKEYKCKVSNKALPAPIEKTISKAKGQPREP
QVYTLPPSREEMTKNQVSLTCLVKGFYPSDIAVEWESNGQPENNYKTTPPVLDSDGSFFLYSKLTVDKS
RWQQGNVFSCSVMHEALHNHYTQKSLSLSPGK
SEQ ID NO: 749
14052_HC [hu anti-<huCDH19> 4B10 (1-471)(R17G, D61E, D72E, W134Y)
VH]::huIgG1z
QVQLVESGGGVVQPGGSLRLSCAASGFTFSSYDMHWVRQAPGKGLEWVAVISYEGTNEYYAESVKGR
FTISRDTSKNTLYLQMNSLRAEDTAVYYCARERYFDYSFDYWGQGTLVSVSSASTKGPSVFPLAPSSKS
TSGGTAALGCLVKDYFPEPVTVSWNSGALTSGVHTFPAVLQSSGLYSLSSVVTVPSSSLGTQTYICNVN
HKPSNTKVDKKVEPKSCDKTHTCPPCPAPELLGGPSVFLFPPKPKDTLMISRTPEVTCVVVDVSHEDPEV
KFNWYVDGVEVHNAKTKPREEQYNSTYRVVSVLTVLHQDWLNGKEYKCKVSNKALPAPIEKTISKAK
GQPREPQVYTLPPSREEMTKNQVSLTCLVKGFYPSDIAVEWESNGQPENNYKTTPPVLDSDGSFFLYSK
LTVDKSRWQQGNVFSCSVMHEALHNHYTQKSLSLSPGK
SEQ ID NO: 750
14053_HC [hu anti-<huCDH19> 4B10 VH]::huIgG1z
QVQLVESGGGVVQPGRSLRLSCAASGFTFSSYDMHWVRQAPGKGLEWVAVISYDGTNEYYADSVKGR
FTISRDTSKNTLYLQMNSLRAEDTAVYYCARERYFDWSFDYWGQGTLVSVSSASTKGPSVFPLAPSSKS
TSGGTAALGCLVKDYFPEPVTVSWNSGALTSGVHTFPAVLQSSGLYSLSSVVTVPSSSLGTQTYICNVN
HKPSNTKVDKKVEPKSCDKTHTCPPCPAPELLGGPSVFLFPPKPKDTLMISRTPEVTCVVVDVSHEDPEV
KFNWYVDGVEVHNAKTKPREEQYNSTYRVVSVLTVLHQDWLNGKEYKCKVSNKALPAPIEKTISKAK
GQPREPQVYTLPPSREEMTKNQVSLTCLVKGFYPSDIAVEWESNGQPENNYKTTPPVLDSDGSFFLYSK
LTVDKSRWQQGNVFSCSVMHEALHNHYTQKSLSLSPGK
SEQ ID NO: 751
14054_HC [hu anti-<huCDH19> 4B10 (1-471)(R17G) VH]::huIgG1z
QVQLVESGGGVVQPGGSLRLSCAASGFTFSSYDMHWVRQAPGKGLEWVAVISYDGTNEYYADSVKG
RFTISRDTSKNTLYLQMNSLRAEDTAVYYCARERYFDWSFDYWGQGTLVSVSSASTKGPSVFPLAPSSK
STSGGTAALGCLVKDYFPEPVTVSWNSGALTSGVHTFPAVLQSSGLYSLSSVVTVPSSSLGTQTYICNVN
HKPSNTKVDKKVEPKSCDKTHTCPPCPAPELLGGPSVFLFPPKPKDTLMISRTPEVTCVVVDVSHEDPEV
KFNWYVDGVEVHNAKTKPREEQYNSTYRVVSVLTVLHQDWLNGKEYKCKVSNKALPAPIEKTISKAK
GQPREPQVYTLPPSREEMTKNQVSLTCLVKGFYPSDIAVEWESNGQPENNYKTTPPVLDSDGSFFLYSK
LTVDKSRWQQGNVFSCSVMHEALHNHYTQKSLSLSPGK
SEQ ID NO: 752
14055_HC [hu anti-<huCDH19> 4B10 (1-471)(R17G, D61E, D72E) VH]::huIgG1z
QVQLVESGGGVVQPGGSLRLSCAASGFTFSSYDMHWVRQAPGKGLEWVAVISYEGTNEYYAESVKGR
FTISRDTSKNTLYLQMNSLRAEDTAVYYCARERYFDWSFDYWGQGTLVSVSSASTKGPSVFPLAPSSKS
TSGGTAALGCLVKDYFPEPVTVSWNSGALTSGVHTFPAVLQSSGLYSLSSVVTVPSSSLGTQTYICNVN
HKPSNTKVDKKVEPKSCDKTHTCPPCPAPELLGGPSVFLFPPKPKDTLMISRTPEVTCVVVDVSHEDPEV
KFNWYVDGVEVHNAKTKPREEQYNSTYRVVSVLTVLHQDWLNGKEYKCKVSNKALPAPIEKTISKAK
GQPREPQVYTLPPSREEMTKNQVSLTCLVKGFYPSDIAVEWESNGQPENNYKTTPPVLDSDGSFFLYSK
LTVDKSRWQQGNVFSCSVMHEALHNHYTQKSLSLSPGK
SEQ ID NO: 753
14056_HC [hu anti-<huCDH19> 4A9 VH]::huIgG1z
QVQLQESGPGLVKPSETLSLTCTVSGGSISGYYWSWIRQPPGKGLEWFAYFSYSGSTNYNPSLKSRVTLS
VDTSKNQFSLKLSSVTAADTAVYYCARNWAFHFDFWGQGTLVTVSSASTKGPSVFPLAPSSKSTSGGT
AALGCLVKDYFPEPVTVSWNSGALTSGVHTFPAVLQSSGLYSLSSVVTVPSSSLGTQTYICNVNHKPSN
TKVDKKVEPKSCDKTHTCPPCPAPELLGGPSVFLFPPKPKDTLMISRTPEVTCVVVDVSHEDPEVKFNW
YVDGVEVHNAKTKPREEQYNSTYRVVSVLTVLHQDWLNGKEYKCKVSNKALPAPIEKTISKAKGQPR
EPQVYTLPPSREEMTKNQVSLTCLVKGFYPSDIAVEWESNGQPENNYKTTPPVLDSDGSFFLYSKLTVD
KSRWQQGNVFSCSVMHEALHNHYTQKSLSLSPGK
SEQ ID NO: 754
14057_HC [hu anti-<huCDH19> 4A9 (1-468)(F55I, A56G) VH]::huIgG1z
QVQLQESGPGLVKPSETLSLTCTVSGGSISGYYWSWIRQPPGKGLEWIGYFSYSGSTNYNPSLKSRVTLS
VDTSKNQFSLKLSSVTAADTAVYYCARNWAFHFDFWGQGTLVTVSSASTKGPSVFPLAPSSKSTSGGT
AALGCLVKDYFPEPVTVSWNSGALTSGVHTFPAVLQSSGLYSLSSVVTVPSSSLGTQTYICNVNHKPSN
TKVDKKVEPKSCDKTHTCPPCPAPELLGGPSVFLFPPKPKDTLMISRTPEVTCVVVDVSHEDPEVKFNW
YVDGVEVHNAKTKPREEQYNSTYRVVSVLTVLHQDWLNGKEYKCKVSNKALPAPIEKTISKAKGQPR
EPQVYTLPPSREEMTKNQVSLTCLVKGFYPSDIAVEWESNGQPENNYKTTPPVLDSDGSFFLYSKLTVD
KSRWQQGNVFSCSVMHEALHNHYTQKSLSLSPGK
SEQ ID NO: 755
14058_HC [hu anti-<huCDH19> 4A9 (1-468)(F55I, A56G) VH]::huIgG1z
QVQLQESGPGLVKPSETLSLTCTVSGGSISGYYWSWIRQPPGKGLEWIGYFSYSGSTNYNPSLKSRVTLS
VDTSKNQFSLKLSSVTAADTAVYYCARNWAFHFDFWGQGTLVTVSSASTKGPSVFPLAPSSKSTSGGT
AALGCLVKDYFPEPVTVSWNSGALTSGVHTFPAVLQSSGLYSLSSVVTVPSSSLGTQTYICNVNHKPSN
TKVDKKVEPKSCDKTHTCPPCPAPELLGGPSVFLFPPKPKDTLMISRTPEVTCVVVDVSHEDPEVKFNW
YVDGVEVHNAKTKPREEQYNSTYRVVSVLTVLHQDWLNGKEYKCKVSNKALPAPIEKTISKAKGQPR
EPQVYTLPPSREEMTKNQVSLTCLVKGFYPSDIAVEWESNGQPENNYKTTPPVLDSDGSFFLYSKLTVD
KSRWQQGNVFSCSVMHEALHNHYTQKSLSLSPGK
SEQ ID NO: 756
14059_HC [hu anti-<huCDH19> 4A9 (1-468)(F55I, A56G, W113Y) VH]::huIgG1z
QVQLQESGPGLVKPSETLSLTCTVSGGSISGYYWSWIRQPPGKGLEWIGYFSYSGSTNYNPSLKSRVTLS
VDTSKNQFSLKLSSVTAADTAVYYCARNYAFHFDFWGQGTLVTVSSASTKGPSVFPLAPSSKSTSGGTA
ALGCLVKDYFPEPVTVSWNSGALTSGVHTFPAVLQSSGLYSLSSVVTVPSSSLGTQTYICNVNHKPSNT
KVDKKVEPKSCDKTHTCPPCPAPELLGGPSVFLFPPKPKDTLMISRTPEVTCVVVDVSHEDPEVKFNWY
VDGVEVHNAKTKPREEQYNSTYRVVSVLTVLHQDWLNGKEYKCKVSNKALPAPIEKTISKAKGQPREP
QVYTLPPSREEMTKNQVSLTCLVKGFYPSDIAVEWESNGQPENNYKTTPPVLDSDGSFFLYSKLTVDKS
RWQQGNVFSCSVMHEALHNHYTQKSLSLSPGK
SEQ ID NO: 757
14060_HC [hu anti-<huCDH19> 20D3.1 VH]::huIgG1z
QVQLVQSGAEVKKPGASVKVSCKVSGYTFTSYFIHWVRQAPGQGLEWMGIINPISVSTSYAQKFQGRV
TMTRDTSTSTVFMELSSLRSEDTAVYYCARGGIQLWLHFDYWGQGTLVTVSSASTKGPSVFPLAPSSKS
TSGGTAALGCLVKDYFPEPVTVSWNSGALTSGVHTFPAVLQSSGLYSLSSVVTVPSSSLGTQTYICNVN
HKPSNTKVDKKVEPKSCDKTHTCPPCPAPELLGGPSVFLFPPKPKDTLMISRTPEVTCVVVDVSHEDPEV
KFNWYVDGVEVHNAKTKPREEQYNSTYRVVSVLTVLHQDWLNGKEYKCKVSNKALPAPIEKTISKAK
GQPREPQVYTLPPSREEMTKNQVSLTCLVKGFYPSDIAVEWESNGQPENNYKTTPPVLDSDGSFFLYSK
LTVDKSRWQQGNVFSCSVMHEALHNHYTQKSLSLSPGK
SEQ ID NO: 758
14061_HC [hu anti-<huCDH19> 20D3.1 VH]::huIgG1z
QVQLVQSGAEVKKPGASVKVSCKVSGYTFTSYFIHWVRQAPGQGLEWMGIINPISVSTSYAQKFQGRV
TMTRDTSTSTVFMELSSLRSEDTAVYYCARGGIQLWLHFDYWGQGTLVTVSSASTKGPSVFPLAPSSKS
TSGGTAALGCLVKDYFPEPVTVSWNSGALTSGVHTFPAVLQSSGLYSLSSVVTVPSSSLGTQTYICNVN
HKPSNTKVDKKVEPKSCDKTHTCPPCPAPELLGGPSVFLFPPKPKDTLMISRTPEVTCVVVDVSHEDPEV
KFNWYVDGVEVHNAKTKPREEQYNSTYRVVSVLTVLHQDWLNGKEYKCKVSNKALPAPIEKTISKAK
GQPREPQVYTLPPSREEMTKNQVSLTCLVKGFYPSDIAVEWESNGQPENNYKTTPPVLDSDGSFFLYSK
LTVDKSRWQQGNVFSCSVMHEALHNHYTQKSLSLSPGK
SEQ ID NO: 759
14062_HC [hu anti-<huCDH19> 20D3.1 (1-469)(W133Y) VH]::huIgG1z
QVQLVQSGAEVKKPGASVKVSCKVSGYTFTSYFIHWVRQAPGQGLEWMGIINPISVSTSYAQKFQGRV
TMTRDTSTSTVFMELSSLRSEDTAVYYCARGGIQLYLHFDYWGQGTLVTVSSASTKGPSVFPLAPSSKS
TSGGTAALGCLVKDYFPEPVTVSWNSGALTSGVHTFPAVLQSSGLYSLSSVVTVPSSSLGTQTYICNVN
HKPSNTKVDKKVEPKSCDKTHTCPPCPAPELLGGPSVFLFPPKPKDTLMISRTPEVTCVVVDVSHEDPEV
KFNWYVDGVEVHNAKTKPREEQYNSTYRVVSVLTVLHQDWLNGKEYKCKVSNKALPAPIEKTISKAK
GQPREPQVYTLPPSREEMTKNQVSLTCLVKGFYPSDIAVEWESNGQPENNYKTTPPVLDSDGSFFLYSK
LTVDKSRWQQGNVFSCSVMHEALHNHYTQKSLSLSPGK
SEQ ID NO: 760
14063_HC [hu anti-<huCDH19> 20D3.1 (1-469)(W133Y) VH]::huIgG1z
QVQLVQSGAEVKKPGASVKVSCKVSGYTFTSYFIHWVRQAPGQGLEWMGIINPISVSTSYAQKFQGRV
TMTRDTSTSTVFMELSSLRSEDTAVYYCARGGIQLYLHFDYWGQGTLVTVSSASTKGPSVFPLAPSSKS
TSGGTAALGCLVKDYFPEPVTVSWNSGALTSGVHTFPAVLQSSGLYSLSSVVTVPSSSLGTQTYICNVN
HKPSNTKVDKKVEPKSCDKTHTCPPCPAPELLGGPSVFLFPPKPKDTLMISRTPEVTCVVVDVSHEDPEV
KFNWYVDGVEVHNAKTKPREEQYNSTYRVVSVLTVLHQDWLNGKEYKCKVSNKALPAPIEKTISKAK
GQPREPQVYTLPPSREEMTKNQVSLTCLVKGFYPSDIAVEWESNGQPENNYKTTPPVLDSDGSFFLYSK
LTVDKSRWQQGNVFSCSVMHEALHNHYTQKSLSLSPGK
SEQ ID NO: 761
14064_HC [hu anti-<huCDH19> 20D3.1 (1-469)(W133Y) VH]::huIgG1z
QVQLVQSGAEVKKPGASVKVSCKVSGYTFTSYFIHWVRQAPGQGLEWMGIINPISVSTSYAQKFQGRV
TMTRDTSTSTVFMELSSLRSEDTAVYYCARGGIQLYLHFDYWGQGTLVTVSSASTKGPSVFPLAPSSKS
TSGGTAALGCLVKDYFPEPVTVSWNSGALTSGVHTFPAVLQSSGLYSLSSVVTVPSSSLGTQTYICNVN
HKPSNTKVDKKVEPKSCDKTHTCPPCPAPELLGGPSVFLFPPKPKDTLMISRTPEVTCVVVDVSHEDPEV
KFNWYVDGVEVHNAKTKPREEQYNSTYRVVSVLTVLHQDWLNGKEYKCKVSNKALPAPIEKTISKAK
GQPREPQVYTLPPSREEMTKNQVSLTCLVKGFYPSDIAVEWESNGQPENNYKTTPPVLDSDGSFFLYSK
LTVDKSRWQQGNVFSCSVMHEALHNHYTQKSLSLSPGK
SEQ ID NO: 762
14065_HC [hu anti-<huCDH19> 22G10.1 (1-470)(S82R, A99E) VH]::huIgG1z
EVQLLESGGGLVQPGGSLRLSCAASGFTFSSYAMNWVRQAPGKGLEWVSTISGGGANTYYADSVKGR
FTISRDNSKSTLYLQMNSLRAEDTAVYHCAKGGMGGYYYGMDVWGQGTTVTVSSASTKGPSVFPLAP
SSKSTSGGTAALGCLVKDYFPEPVTVSWNSGALTSGVHTFPAVLQSSGLYSLSSVVTVPSSSLGTQTYIC
NVNHKPSNTKVDKKVEPKSCDKTHTCPPCPAPELLGGPSVFLFPPKPKDTLMISRTPEVTCVVVDVSHE
DPEVKFNWYVDGVEVHNAKTKPREEQYNSTYRVVSVLTVLHQDWLNGKEYKCKVSNKALPAPIEKTI
SKAKGQPREPQVYTLPPSREEMTKNQVSLTCLVKGFYPSDIAVEWESNGQPENNYKTTPPVLDSDGSFF
LYSKLTVDKSRWQQGNVFSCSVMHEALHNHYTQKSLSLSPGK
SEQ ID NO: 763
14066_HC [hu anti-<huCDH19> 22G10.1 (1-470)(A99E, H105Y) VH]::huIgG1z
EVQLLESGGGLVQPGGSLRLSCAASGFTFSSYAMNWVRQAPGKGLEWVSTISGGGANTYYADSVKGR
FTISSDNSKSTLYLQMNSLRAEDTAVYYCAKGGMGGYYYGMDVWGQGTTVTVSSASTKGPSVFPLAP
SSKSTSGGTAALGCLVKDYFPEPVTVSWNSGALTSGVHTFPAVLQSSGLYSLSSVVTVPSSSLGTQTYIC
NVNHKPSNTKVDKKVEPKSCDKTHTCPPCPAPELLGGPSVFLFPPKPKDTLMISRTPEVTCVVVDVSHE
DPEVKFNWYVDGVEVHNAKTKPREEQYNSTYRVVSVLTVLHQDWLNGKEYKCKVSNKALPAPIEKTI
SKAKGQPREPQVYTLPPSREEMTKNQVSLTCLVKGFYPSDIAVEWESNGQPENNYKTTPPVLDSDGSFF
LYSKLTVDKSRWQQGNVFSCSVMHEALHNHYTQKSLSLSPGK
SEQ ID NO: 764
14067_HC [hu anti-<huCDH19> 22G10.1 (1-470)(A99E) VH]::huIgG1z
EVQLLESGGGLVQPGGSLRLSCAASGFTFSSYAMNWVRQAPGKGLEWVSTISGGGANTYYADSVKGR
FTISSDNSKSTLYLQMNSLRAEDTAVYHCAKGGMGGYYYGMDVWGQGTTVTVSSASTKGPSVFPLAP
SSKSTSGGTAALGCLVKDYFPEPVTVSWNSGALTSGVHTFPAVLQSSGLYSLSSVVTVPSSSLGTQTYIC
NVNHKPSNTKVDKKVEPKSCDKTHTCPPCPAPELLGGPSVFLFPPKPKDTLMISRTPEVTCVVVDVSHE
DPEVKFNWYVDGVEVHNAKTKPREEQYNSTYRVVSVLTVLHQDWLNGKEYKCKVSNKALPAPIEKTI
SKAKGQPREPQVYTLPPSREEMTKNQVSLTCLVKGFYPSDIAVEWESNGQPENNYKTTPPVLDSDGSFF
LYSKLTVDKSRWQQGNVFSCSVMHEALHNHYTQKSLSLSPGK
SEQ ID NO: 765
14068_HC [hu anti-<huCDH19> 22G10.1 (1-470)(A99E) VH]::huIgG1z
EVQLLESGGGLVQPGGSLRLSCAASGFTFSSYAMNWVRQAPGKGLEWVSTISGGGANTYYADSVKGR
FTISSDNSKSTLYLQMNSLRAEDTAVYHCAKGGMGGYYYGMDVWGQGTTVTVSSASTKGPSVFPLAP
SSKSTSGGTAALGCLVKDYFPEPVTVSWNSGALTSGVHTFPAVLQSSGLYSLSSVVTVPSSSLGTQTYIC
NVNHKPSNTKVDKKVEPKSCDKTHTCPPCPAPELLGGPSVFLFPPKPKDTLMISRTPEVTCVVVDVSHE
DPEVKFNWYVDGVEVHNAKTKPREEQYNSTYRVVSVLTVLHQDWLNGKEYKCKVSNKALPAPIEKTI
SKAKGQPREPQVYTLPPSREEMTKNQVSLTCLVKGFYPSDIAVEWESNGQPENNYKTTPPVLDSDGSFF
LYSKLTVDKSRWQQGNVFSCSVMHEALHNHYTQKSLSLSPGK
SEQ ID NO: 766
14069_HC [hu anti-<huCDH19> 22G10.1 (1-470)(D72E,A99E) VH]::huIgG1z
EVQLLESGGGLVQPGGSLRLSCAASGFTFSSYAMNWVRQAPGKGLEWVSTISGGGANTYYAESVKGRF
TISSDNSKSTLYLQMNSLRAEDTAVYHCAKGGMGGYYYGMDVWGQGTTVTVSSASTKGPSVFPLAPS
SKSTSGGTAALGCLVKDYFPEPVTVSWNSGALTSGVHTFPAVLQSSGLYSLSSVVTVPSSSLGTQTYICN
VNHKPSNTKVDKKVEPKSCDKTHTCPPCPAPELLGGPSVFLFPPKPKDTLMISRTPEVTCVVVDVSHEDP
EVKFNWYVDGVEVHNAKTKPREEQYNSTYRVVSVLTVLHQDWLNGKEYKCKVSNKALPAPIEKTISK
AKGQPREPQVYTLPPSREEMTKNQVSLTCLVKGFYPSDIAVEWESNGQPENNYKTTPPVLDSDGSFFLY
SKLTVDKSRWQQGNVFSCSVMHEALHNHYTQKSLSLSPGK
SEQ ID NO: 767
14070_HC [hu anti-<huCDH19> 22G10.1 (1-470)(H105Y) VH]::huIgG1z
EVQLLESGGGLVQPGGSLRLSCAASGFTFSSYAMNWVRQAPGKGLEWVSTISGGGANTYYADSVKGR
FTISSDNSKSTLYLQMNSLRAADTAVYYCAKGGMGGYYYGMDVWGQGTTVTVSSASTKGPSVFPLAP
SSKSTSGGTAALGCLVKDYFPEPVTVSWNSGALTSGVHTFPAVLQSSGLYSLSSVVTVPSSSLGTQTYIC
NVNHKPSNTKVDKKVEPKSCDKTHTCPPCPAPELLGGPSVFLFPPKPKDTLMISRTPEVTCVVVDVSHE
DPEVKFNWYVDGVEVHNAKTKPREEQYNSTYRVVSVLTVLHQDWLNGKEYKCKVSNKALPAPIEKTI
SKAKGQPREPQVYTLPPSREEMTKNQVSLTCLVKGFYPSDIAVEWESNGQPENNYKTTPPVLDSDGSFF
LYSKLTVDKSRWQQGNVFSCSVMHEALHNHYTQKSLSLSPGK
SEQ ID NO: 768
14071_HC [hu anti-<huCDH19> 16A4.1 (1-474)(T144L) VH]::huIgG1z
QVQLQESGPGLAKPSETLSLTCTVSGDSITSYYWSWIRQPPGKGLEWIGYIYYSGSTNYNPSLKSRVTISV
DTSKNQFSLKLSSVTAADTAVYYCARDQRRIAAAGTHFYGMDVWGQGTLVTVSSASTKGPSVFPLAPS
SKSTSGGTAALGCLVKDYFPEPVTVSWNSGALTSGVHTFPAVLQSSGLYSLSSVVTVPSSSLGTQTYICN
VNHKPSNTKVDKKVEPKSCDKTHTCPPCPAPELLGGPSVFLFPPKPKDTLMISRTPEVTCVVVDVSHEDP
EVKFNWYVDGVEVHNAKTKPREEQYNSTYRVVSVLTVLHQDWLNGKEYKCKVSNKALPAPIEKTISK
AKGQPREPQVYTLPPSREEMTKNQVSLTCLVKGFYPSDIAVEWESNGQPENNYKTTPPVLDSDGSFFLY
SKLTVDKSRWQQGNVFSCSVMHEALHNHYTQKSLSLSPGK
SEQ ID NO: 769
14072_HC [hu anti-<huCDH19> 19B5.1 VH]::huIgG1z
QVQLVQSGAEVKKPGASVKVSCKVSGYTFTSYFIHWVRQAPGQGLEWMGIINPISVSTSYAQKFQGRV
TMTRDTSTSTVFMELSSLRSEDTAVYYCARGGIQLWLHLDYWGQGTLVTVSSASTKGPSVFPLAPSSKS
TSGGTAALGCLVKDYFPEPVTVSWNSGALTSGVHTFPAVLQSSGLYSLSSVVTVPSSSLGTQTYICNVN
HKPSNTKVDKKVEPKSCDKTHTCPPCPAPELLGGPSVFLFPPKPKDTLMISRTPEVTCVVVDVSHEDPEV
KFNWYVDGVEVHNAKTKPREEQYNSTYRVVSVLTVLHQDWLNGKEYKCKVSNKALPAPIEKTISKAK
GQPREPQVYTLPPSREEMTKNQVSLTCLVKGFYPSDIAVEWESNGQPENNYKTTPPVLDSDGSFFLYSK
LTVDKSRWQQGNVFSCSVMHEALHNHYTQKSLSLSPGK
SEQ ID NO: 770
14073_HC [hu anti-<huCDH19> 19B5.1 (1-469)(W133Y) VH]::huIgG1z
QVQLVQSGAEVKKPGASVKVSCKVSGYTFTSYFIHWVRQAPGQGLEWMGIINPISVSTSYAQKFQGRV
TMTRDTSTSTVFMELSSLRSEDTAVYYCARGGIQLYLHLDYWGQGTLVTVSSASTKGPSVFPLAPSSKS
TSGGTAALGCLVKDYFPEPVTVSWNSGALTSGVHTFPAVLQSSGLYSLSSVVTVPSSSLGTQTYICNVN
HKPSNTKVDKKVEPKSCDKTHTCPPCPAPELLGGPSVFLFPPKPKDTLMISRTPEVTCVVVDVSHEDPEV
KFNWYVDGVEVHNAKTKPREEQYNSTYRVVSVLTVLHQDWLNGKEYKCKVSNKALPAPIEKTISKAK
GQPREPQVYTLPPSREEMTKNQVSLTCLVKGFYPSDIAVEWESNGQPENNYKTTPPVLDSDGSFFLYSK
LTVDKSRWQQGNVFSCSVMHEALHNHYTQKSLSLSPGK
SEQ ID NO: 771
14074_HC [hu anti-<huCDH19> 19B5.1 VH]::huIgG1z
QVQLVQSGAEVKKPGASVKVSCKVSGYTFTSYFIHWVRQAPGQGLEWMGIINPISVSTSYAQKFQGRV
TMTRDTSTSTVFMELSSLRSEDTAVYYCARGGIQLWLHLDYWGQGTLVTVSSASTKGPSVFPLAPSSKS
TSGGTAALGCLVKDYFPEPVTVSWNSGALTSGVHTFPAVLQSSGLYSLSSVVTVPSSSLGTQTYICNVN
HKPSNTKVDKKVEPKSCDKTHTCPPCPAPELLGGPSVFLFPPKPKDTLMISRTPEVTCVVVDVSHEDPEV
KFNWYVDGVEVHNAKTKPREEQYNSTYRVVSVLTVLHQDWLNGKEYKCKVSNKALPAPIEKTISKAK
GQPREPQVYTLPPSREEMTKNQVSLTCLVKGFYPSDIAVEWESNGQPENNYKTTPPVLDSDGSFFLYSK
LTVDKSRWQQGNVFSCSVMHEALHNHYTQKSLSLSPGK
SEQ ID NO: 772
14075_HC [hu anti-<huCDH19> 19B5.1 VH]::huIgG1z
QVQLVQSGAEVKKPGASVKVSCKVSGYTFTSYFIHWVRQAPGQGLEWMGIINPISVSTSYAQKFQGRV
TMTRDTSTSTVFMELSSLRSEDTAVYYCARGGIQLWLHLDYWGQGTLVTVSSASTKGPSVFPLAPSSKS
TSGGTAALGCLVKDYFPEPVTVSWNSGALTSGVHTFPAVLQSSGLYSLSSVVTVPSSSLGTQTYICNVN
HKPSNTKVDKKVEPKSCDKTHTCPPCPAPELLGGPSVFLFPPKPKDTLMISRTPEVTCVVVDVSHEDPEV
KFNWYVDGVEVHNAKTKPREEQYNSTYRVVSVLTVLHQDWLNGKEYKCKVSNKALPAPIEKTISKAK
GQPREPQVYTLPPSREEMTKNQVSLTCLVKGFYPSDIAVEWESNGQPENNYKTTPPVLDSDGSFFLYSK
LTVDKSRWQQGNVFSCSVMHEALHNHYTQKSLSLSPGK
SEQ ID NO: 773
14076_HC [hu anti-<huCDH19> 19B5.1 (1-469)(W133Y) VH]::huIgG1z
QVQLVQSGAEVKKPGASVKVSCKVSGYTFTSYFIHWVRQAPGQGLEWMGIINPISVSTSYAQKFQGRV
TMTRDTSTSTVFMELSSLRSEDTAVYYCARGGIQLYLHLDYWGQGTLVTVSSASTKGPSVFPLAPSSKS
TSGGTAALGCLVKDYFPEPVTVSWNSGALTSGVHTFPAVLQSSGLYSLSSVVTVPSSSLGTQTYICNVN
HKPSNTKVDKKVEPKSCDKTHTCPPCPAPELLGGPSVFLFPPKPKDTLMISRTPEVTCVVVDVSHEDPEV
KFNWYVDGVEVHNAKTKPREEQYNSTYRVVSVLTVLHQDWLNGKEYKCKVSNKALPAPIEKTISKAK
GQPREPQVYTLPPSREEMTKNQVSLTCLVKGFYPSDIAVEWESNGQPENNYKTTPPVLDSDGSFFLYSK
LTVDKSRWQQGNVFSCSVMHEALHNHYTQKSLSLSPGK
SEQ ID NO: 774
14077_HC [hu anti-<huCDH19> 23A10.3 (1-474)(L920) VH]::huIgG1z
QVQLVESGGGVVQPGRSLRLSCAASGFTFSRYGIHWVRQAPGKGLEWVAVIWYDGSNKYYADSVKGR
FTISRDNSKNTLYLQMNSLRAEDSAVYYCARRAGIPGTTGYYYGMDVWGQGTTVTVSSASTKGPSVFP
LAPSSKSTSGGTAALGCLVKDYFPEPVTVSWNSGALTSGVHTFPAVLQSSGLYSLSSVVTVPSSSLGTQT
YICNVNHKPSNTKVDKKVEPKSCDKTHTCPPCPAPELLGGPSVFLFPPKPKDTLMISRTPEVTCVVVDVS
HEDPEVKFNWYVDGVEVHNAKTKPREEQYNSTYRVVSVLTVLHQDWLNGKEYKCKVSNKALPAPIE
KTISKAKGQPREPQVYTLPPSREEMTKNQVSLTCLVKGFYPSDIAVEWESNGQPENNYKTTPPVLDSDG
SFFLYSKLTVDKSRWQQGNVFSCSVMHEALHNHYTQKSLSLSPGK
SEQ ID NO: 775
14078_HC [hu anti-<huCDH19> 23A10.3 (1-474)(R17G, L920) VH]::huIgG1z
QVQLVESGGGVVQPGGSLRLSCAASGFTFSRYGIHWVRQAPGKGLEWVAVIWYDGSNKYYADSVKG
RFTISRDNSKNTLYLQMNSLRAEDSAVYYCARRAGIPGTTGYYYGMDVWGQGTTVTVSSASTKGPSVF
PLAPSSKSTSGGTAALGCLVKDYFPEPVTVSWNSGALTSGVHTFPAVLQSSGLYSLSSVVTVPSSSLGTQ
TYICNVNHKPSNTKVDKKVEPKSCDKTHTCPPCPAPELLGGPSVFLFPPKPKDTLMISRTPEVTCVVVDV
SHEDPEVKFNWYVDGVEVHNAKTKPREEQYNSTYRVVSVLTVLHQDWLNGKEYKCKVSNKALPAPIE
KTISKAKGQPREPQVYTLPPSREEMTKNQVSLTCLVKGFYPSDIAVEWESNGQPENNYKTTPPVLDSDG
SFFLYSKLTVDKSRWQQGNVFSCSVMHEALHNHYTQKSLSLSPGK
SEQ ID NO: 776
14079_HC [hu anti-<huCDH19> 23A10.3 (1-474)(R17G, D61E, D72E, L920)
VH]::huIgG1z
QVQLVESGGGVVQPGGSLRLSCAASGFTFSRYGIHWVRQAPGKGLEWVAVIWYEGSNKYYAESVKGR
FTISRDNSKNTLYLQMNSLRAEDSAVYYCARRAGIPGTTGYYYGMDVWGQGTTVTVSSASTKGPSVFP
LAPSSKSTSGGTAALGCLVKDYFPEPVTVSWNSGALTSGVHTFPAVLQSSGLYSLSSVVTVPSSSLGTQT
YICNVNHKPSNTKVDKKVEPKSCDKTHTCPPCPAPELLGGPSVFLFPPKPKDTLMISRTPEVTCVVVDVS
HEDPEVKFNWYVDGVEVHNAKTKPREEQYNSTYRVVSVLTVLHQDWLNGKEYKCKVSNKALPAPIE
KTISKAKGQPREPQVYTLPPSREEMTKNQVSLTCLVKGFYPSDIAVEWESNGQPENNYKTTPPVLDSDG
SFFLYSKLTVDKSRWQQGNVFSCSVMHEALHNHYTQKSLSLSPGK
SEQ ID NO: 777
14080_HC [hu anti-<huCDH19> 23A10.3 VH]::huIgG1z
QVQLVESGGGVVQPGRSLRLSCAASGFTFSRYGIHWVRQAPGKGLEWVAVIWYDGSNKYYADSVKGR
FTISRDNSKNTLYLLMNSLRAEDSAVYYCARRAGIPGTTGYYYGMDVWGQGTTVTVSSASTKGPSVFP
LAPSSKSTSGGTAALGCLVKDYFPEPVTVSWNSGALTSGVHTFPAVLQSSGLYSLSSVVTVPSSSLGTQT
YICNVNHKPSNTKVDKKVEPKSCDKTHTCPPCPAPELLGGPSVFLFPPKPKDTLMISRTPEVTCVVVDVS
HEDPEVKFNWYVDGVEVHNAKTKPREEQYNSTYRVVSVLTVLHQDWLNGKEYKCKVSNKALPAPIE
KTISKAKGQPREPQVYTLPPSREEMTKNQVSLTCLVKGFYPSDIAVEWESNGQPENNYKTTPPVLDSDG
SFFLYSKLTVDKSRWQQGNVFSCSVMHEALHNHYTQKSLSLSPGK
SEQ ID NO: 778
14081_HC [hu anti-<huCDH19> 25G10.1 VH]::huIgG1z
QVQLQESGPGLVKPSETLSLTCTVSGGSISGYYWSWIRQPPGKGLEWIGYIYYIGSTNYNPSLKSRVTMS
VDTSKNQFSLKLSSVTAADTAVYYCARDGSSGWYRWFDPWGQGTLVTVSSASTKGPSVFPLAPSSKST
SGGTAALGCLVKDYFPEPVTVSWNSGALTSGVHTFPAVLQSSGLYSLSSVVTVPSSSLGTQTYICNVNH
KPSNTKVDKKVEPKSCDKTHTCPPCPAPELLGGPSVFLFPPKPKDTLMISRTPEVTCVVVDVSHEDPEVK
FNWYVDGVEVHNAKTKPREEQYNSTYRVVSVLTVLHQDWLNGKEYKCKVSNKALPAPIEKTISKAKG
QPREPQVYTLPPSREEMTKNQVSLTCLVKGFYPSDIAVEWESNGQPENNYKTTPPVLDSDGSFFLYSKL
TVDKSRWQQGNVFSCSVMHEALHNHYTQKSLSLSPGK
SEQ ID NO: 779
14082_HC [hu anti-<huCDH19> 25G10.1 (1-469)(D109E, W132Y, W135Y)
VH]:huIgG1z
QVQLQESGPGLVKPSETLSLTCTVSGGSISGYYWSWIRQPPGKGLEWIGYIYYIGSTNYNPSLKSRVTMS
VDTSKNQFSLKLSSVTAADTAVYYCAREGSSGYYRYFDPWGQGTLVTVSSASTKGPSVFPLAPSSKSTS
GGTAALGCLVKDYFPEPVTVSWNSGALTSGVHTFPAVLQSSGLYSLSSVVTVPSSSLGTQTYICNVNHK
PSNTKVDKKVEPKSCDKTHTCPPCPAPELLGGPSVFLFPPKPKDTLMISRTPEVTCVVVDVSHEDPEVKF
NWYVDGVEVHNAKTKPREEQYNSTYRVVSVLTVLHQDWLNGKEYKCKVSNKALPAPIEKTISKAKGQ
PREPQVYTLPPSREEMTKNQVSLTCLVKGFYPSDIAVEWESNGQPENNYKTTPPVLDSDGSFFLYSKLT
VDKSRWQQGNVFSCSVMHEALHNHYTQKSLSLSPGK
SEQ ID NO: 780
14083_HC [hu anti-<huCDH19> 26D1.1 VH]::huIgG1z
QVQLVQSGAEVKKPGASVKVSCKASRYTFTSYYMSWVRQAPGQGLEWMGIIHPSGGDTTYAQKFQGR
VTMTGDTSTSTVYMELSSLRSEDTAVYYCARGGIKLWLHFDYWGQGTLVTVSSASTKGPSVFPLAPSS
KSTSGGTAALGCLVKDYFPEPVTVSWNSGALTSGVHTFPAVLQSSGLYSLSSVVTVPSSSLGTQTYICNV
NHKPSNTKVDKKVEPKSCDKTHTCPPCPAPELLGGPSVFLFPPKPKDTLMISRTPEVTCVVVDVSHEDPE
VKFNWYVDGVEVHNAKTKPREEQYNSTYRVVSVLTVLHQDWLNGKEYKCKVSNKALPAPIEKTISKA
KGQPREPQVYTLPPSREEMTKNQVSLTCLVKGFYPSDIAVEWESNGQPENNYKTTPPVLDSDGSFFLYS
KLTVDKSRWQQGNVFSCSVMHEALHNHYTQKSLSLSPGK
SEQ ID NO: 781
14084_HC [hu anti-<huCDH19> 26D1.1 VH]::huIgG1z
QVQLVQSGAEVKKPGASVKVSCKASRYTFTSYYMSWVRQAPGQGLEWMGIIHPSGGDTTYAQKFQGR
VTMTGDTSTSTVYMELSSLRSEDTAVYYCARGGIKLWLHFDYWGQGTLVTVSSASTKGPSVFPLAPSS
KSTSGGTAALGCLVKDYFPEPVTVSWNSGALTSGVHTFPAVLQSSGLYSLSSVVTVPSSSLGTQTYICNV
NHKPSNTKVDKKVEPKSCDKTHTCPPCPAPELLGGPSVFLFPPKPKDTLMISRTPEVTCVVVDVSHEDPE
VKFNWYVDGVEVHNAKTKPREEQYNSTYRVVSVLTVLHQDWLNGKEYKCKVSNKALPAPIEKTISKA
KGQPREPQVYTLPPSREEMTKNQVSLTCLVKGFYPSDIAVEWESNGQPENNYKTTPPVLDSDGSFFLYS
KLTVDKSRWQQGNVFSCSVMHEALHNHYTQKSLSLSPGK
SEQ ID NO: 782
14085_HC [hu anti-<huCDH19> 26D1.1 VH]::huIgG1z
QVQLVQSGAEVKKPGASVKVSCKASRYTFTSYYMSWVRQAPGQGLEWMGIIHPSGGDTTYAQKFQGR
VTMTGDTSTSTVYMELSSLRSEDTAVYYCARGGIKLWLHFDYWGQGTLVTVSSASTKGPSVFPLAPSS
KSTSGGTAALGCLVKDYFPEPVTVSWNSGALTSGVHTFPAVLQSSGLYSLSSVVTVPSSSLGTQTYICNV
NHKPSNTKVDKKVEPKSCDKTHTCPPCPAPELLGGPSVFLFPPKPKDTLMISRTPEVTCVVVDVSHEDPE
VKFNWYVDGVEVHNAKTKPREEQYNSTYRVVSVLTVLHQDWLNGKEYKCKVSNKALPAPIEKTISKA
KGQPREPQVYTLPPSREEMTKNQVSLTCLVKGFYPSDIAVEWESNGQPENNYKTTPPVLDSDGSFFLYS
KLTVDKSRWQQGNVFSCSVMHEALHNHYTQKSLSLSPGK
SEQ ID NO: 783
14086_HC [hu anti-<huCDH19> 26D1.1 VH]::huIgG1z
QVQLVQSGAEVKKPGASVKVSCKASRYTFTSYYMSWVRQAPGQGLEWMGIIHPSGGDTTYAQKFQGR
VTMTGDTSTSTVYMELSSLRSEDTAVYYCARGGIKLWLHFDYWGQGTLVTVSSASTKGPSVFPLAPSS
KSTSGGTAALGCLVKDYFPEPVTVSWNSGALTSGVHTFPAVLQSSGLYSLSSVVTVPSSSLGTQTYICNV
NHKPSNTKVDKKVEPKSCDKTHTCPPCPAPELLGGPSVFLFPPKPKDTLMISRTPEVTCVVVDVSHEDPE
VKFNWYVDGVEVHNAKTKPREEQYNSTYRVVSVLTVLHQDWLNGKEYKCKVSNKALPAPIEKTISKA
KGQPREPQVYTLPPSREEMTKNQVSLTCLVKGFYPSDIAVEWESNGQPENNYKTTPPVLDSDGSFFLYS
KLTVDKSRWQQGNVFSCSVMHEALHNHYTQKSLSLSPGK
SEQ ID NO: 784
14087_HC [hu anti-<huCDH19> 26D1.1 (1-469)(W133Y) VH]::huIgG1z
QVQLVQSGAEVKKPGASVKVSCKASRYTFTSYYMSWVRQAPGQGLEWMGIIHPSGGDTTYAQKFQGR
VTMTGDTSTSTVYMELSSLRSEDTAVYYCARGGIKLYLHFDYWGQGTLVTVSSASTKGPSVFPLAPSSK
STSGGTAALGCLVKDYFPEPVTVSWNSGALTSGVHTFPAVLQSSGLYSLSSVVTVPSSSLGTQTYICNVN
HKPSNTKVDKKVEPKSCDKTHTCPPCPAPELLGGPSVFLFPPKPKDTLMISRTPEVTCVVVDVSHEDPEV
KFNWYVDGVEVHNAKTKPREEQYNSTYRVVSVLTVLHQDWLNGKEYKCKVSNKALPAPIEKTISKAK
GQPREPQVYTLPPSREEMTKNQVSLTCLVKGFYPSDIAVEWESNGQPENNYKTTPPVLDSDGSFFLYSK
LTVDKSRWQQGNVFSCSVMHEALHNHYTQKSLSLSPGK
SEQ ID NO: 785
14088_HC [hu anti-<huCDH19> 26D1.1 (1-469)(R27G, G82R) VH]::huIgG1z
QVQLVQSGAEVKKPGASVKVSCKASGYTFTSYYMSWVRQAPGQGLEWMGIIHPSGGDTTYAQKFQGR
VTMTRDTSTSTVYMELSSLRSEDTAVYYCARGGIKLWLHFDYWGQGTLVTVSSASTKGPSVFPLAPSS
KSTSGGTAALGCLVKDYFPEPVTVSWNSGALTSGVHTFPAVLQSSGLYSLSSVVTVPSSSLGTQTYICNV
NHKPSNTKVDKKVEPKSCDKTHTCPPCPAPELLGGPSVFLFPPKPKDTLMISRTPEVTCVVVDVSHEDPE
VKFNWYVDGVEVHNAKTKPREEQYNSTYRVVSVLTVLHQDWLNGKEYKCKVSNKALPAPIEKTISKA
KGQPREPQVYTLPPSREEMTKNQVSLTCLVKGFYPSDIAVEWESNGQPENNYKTTPPVLDSDGSFFLYS
KLTVDKSRWQQGNVFSCSVMHEALHNHYTQKSLSLSPGK
SEQ ID NO: 786
14089_HC [hu anti-<huCDH19> 26F12.1 VH]::huIgG1z
QVQLVQSGAEVKKPGASVKVSCKASRYTFTNYYMSWVRQAPGQGLEWMGIINPSGGDSTYAQKFQG
RLTMTGDTSTSTVYMELSSLRSEDTAVYYCARGGIQLWLHFDYWGQGTLVTVSSASTKGPSVFPLAPSS
KSTSGGTAALGCLVKDYFPEPVTVSWNSGALTSGVHTFPAVLQSSGLYSLSSVVTVPSSSLGTQTYICNV
NHKPSNTKVDKKVEPKSCDKTHTCPPCPAPELLGGPSVFLFPPKPKDTLMISRTPEVTCVVVDVSHEDPE
VKFNWYVDGVEVHNAKTKPREEQYNSTYRVVSVLTVLHQDWLNGKEYKCKVSNKALPAPIEKTISKA
KGQPREPQVYTLPPSREEMTKNQVSLTCLVKGFYPSDIAVEWESNGQPENNYKTTPPVLDSDGSFFLYS
KLTVDKSRWQQGNVFSCSVMHEALHNHYTQKSLSLSPGK
SEQ ID NO: 787
14090_HC [hu anti-<huCDH19> 26F12.1 VH]::huIgG1z
QVQLVQSGAEVKKPGASVKVSCKASRYTFTNYYMSWVRQAPGQGLEWMGIINPSGGDSTYAQKFQG
RLTMTGDTSTSTVYMELSSLRSEDTAVYYCARGGIQLWLHFDYWGQGTLVTVSSASTKGPSVFPLAPSS
KSTSGGTAALGCLVKDYFPEPVTVSWNSGALTSGVHTFPAVLQSSGLYSLSSVVTVPSSSLGTQTYICNV
NHKPSNTKVDKKVEPKSCDKTHTCPPCPAPELLGGPSVFLFPPKPKDTLMISRTPEVTCVVVDVSHEDPE
VKFNWYVDGVEVHNAKTKPREEQYNSTYRVVSVLTVLHQDWLNGKEYKCKVSNKALPAPIEKTISKA
KGQPREPQVYTLPPSREEMTKNQVSLTCLVKGFYPSDIAVEWESNGQPENNYKTTPPVLDSDGSFFLYS
KLTVDKSRWQQGNVFSCSVMHEALHNHYTQKSLSLSPGK
SEQ ID NO: 788
14091_HC [hu anti-<huCDH19>26F12.1 (1-469)(W133Y) VH]::huIgG1z
QVQLVQSGAEVKKPGASVKVSCKASRYTFTNYYMSWVRQAPGQGLEWMGIINPSGGDSTYAQKFQG
RLTMTGDTSTSTVYMELSSLRSEDTAVYYCARGGIQLYLHFDYWGQGTLVTVSSASTKGPSVFPLAPSS
KSTSGGTAALGCLVKDYFPEPVTVSWNSGALTSGVHTFPAVLQSSGLYSLSSVVTVPSSSLGTQTYICNV
NHKPSNTKVDKKVEPKSCDKTHTCPPCPAPELLGGPSVFLFPPKPKDTLMISRTPEVTCVVVDVSHEDPE
VKFNWYVDGVEVHNAKTKPREEQYNSTYRVVSVLTVLHQDWLNGKEYKCKVSNKALPAPIEKTISKA
KGQPREPQVYTLPPSREEMTKNQVSLTCLVKGFYPSDIAVEWESNGQPENNYKTTPPVLDSDGSFFLYS
KLTVDKSRWQQGNVFSCSVMHEALHNHYTQKSLSLSPGK
SEQ ID NO: 789
14092_HC [hu anti-<huCDH19> 26F12.1 (1-469)(W133Y) VH]::huIgG1z
QVQLVQSGAEVKKPGASVKVSCKASRYTFTNYYMSWVRQAPGQGLEWMGIINPSGGDSTYAQKFQG
RLTMTGDTSTSTVYMELSSLRSEDTAVYYCARGGIQLYLHFDYWGQGTLVTVSSASTKGPSVFPLAPSS
KSTSGGTAALGCLVKDYFPEPVTVSWNSGALTSGVHTFPAVLQSSGLYSLSSVVTVPSSSLGTQTYICNV
NHKPSNTKVDKKVEPKSCDKTHTCPPCPAPELLGGPSVFLFPPKPKDTLMISRTPEVTCVVVDVSHEDPE
VKFNWYVDGVEVHNAKTKPREEQYNSTYRVVSVLTVLHQDWLNGKEYKCKVSNKALPAPIEKTISKA
KGQPREPQVYTLPPSREEMTKNQVSLTCLVKGFYPSDIAVEWESNGQPENNYKTTPPVLDSDGSFFLYS
KLTVDKSRWQQGNVFSCSVMHEALHNHYTQKSLSLSPGK
SEQ ID NO: 790
14093_HC [hu anti-<huCDH19> 25F8.1 VH]::huIgG1z
QVQLVQSGAEVKKPGASVKVSCKASGYTFTSYYIHWVRQAPGQGLEWMGIINPSGGSTRYAQKFQGR
VTMTRDTSTSTVFMELSSLRSEDTAVYYCARGGIQLWLHFDYWGQGTLVTVSSASTKGPSVFPLAPSSK
STSGGTAALGCLVKDYFPEPVTVSWNSGALTSGVHTFPAVLQSSGLYSLSSVVTVPSSSLGTQTYICNVN
HKPSNTKVDKKVEPKSCDKTHTCPPCPAPELLGGPSVFLFPPKPKDTLMISRTPEVTCVVVDVSHEDPEV
KFNWYVDGVEVHNAKTKPREEQYNSTYRVVSVLTVLHQDWLNGKEYKCKVSNKALPAPIEKTISKAK
GQPREPQVYTLPPSREEMTKNQVSLTCLVKGFYPSDIAVEWESNGQPENNYKTTPPVLDSDGSFFLYSK
LTVDKSRWQQGNVFSCSVMHEALHNHYTQKSLSLSPGK
SEQ ID NO: 791
14094_HC [hu anti-<huCDH19> 25F8.1 VH]::huIgG1z
QVQLVQSGAEVKKPGASVKVSCKASGYTFTSYYIHWVRQAPGQGLEWMGIINPSGGSTRYAQKFQGR
VTMTRDTSTSTVFMELSSLRSEDTAVYYCARGGIQLWLHFDYWGQGTLVTVSSASTKGPSVFPLAPSSK
STSGGTAALGCLVKDYFPEPVTVSWNSGALTSGVHTFPAVLQSSGLYSLSSVVTVPSSSLGTQTYICNVN
HKPSNTKVDKKVEPKSCDKTHTCPPCPAPELLGGPSVFLFPPKPKDTLMISRTPEVTCVVVDVSHEDPEV
KFNWYVDGVEVHNAKTKPREEQYNSTYRVVSVLTVLHQDWLNGKEYKCKVSNKALPAPIEKTISKAK
GQPREPQVYTLPPSREEMTKNQVSLTCLVKGFYPSDIAVEWESNGQPENNYKTTPPVLDSDGSFFLYSK
LTVDKSRWQQGNVFSCSVMHEALHNHYTQKSLSLSPGK
SEQ ID NO: 792
14095_HC [hu anti-<huCDH19> 25F8.1 (1-469)(F90Y) VH]::huIgG1z
QVQLVQSGAEVKKPGASVKVSCKASGYTFTSYYIHWVRQAPGQGLEWMGIINPSGGSTRYAQKFQGR
VTMTRDTSTSTVYMELSSLRSEDTAVYYCARGGIQLWLHFDYWGQGTLVTVSSASTKGPSVFPLAPSS
KSTSGGTAALGCLVKDYFPEPVTVSWNSGALTSGVHTFPAVLQSSGLYSLSSVVTVPSSSLGTQTYICNV
NHKPSNTKVDKKVEPKSCDKTHTCPPCPAPELLGGPSVFLFPPKPKDTLMISRTPEVTCVVVDVSHEDPE
VKFNWYVDGVEVHNAKTKPREEQYNSTYRVVSVLTVLHQDWLNGKEYKCKVSNKALPAPIEKTISKA
KGQPREPQVYTLPPSREEMTKNQVSLTCLVKGFYPSDIAVEWESNGQPENNYKTTPPVLDSDGSFFLYS
KLTVDKSRWQQGNVFSCSVMHEALHNHYTQKSLSLSPGK
SEQ ID NO: 793
14096_HC [hu anti-<huCDH19>25F8.1 (1-469)(F90Y) VH]::huIgG1z
QVQLVQSGAEVKKPGASVKVSCKASGYTFTSYYIHWVRQAPGQGLEWMGIINPSGGSTRYAQKFQGR
VTMTRDTSTSTVYMELSSLRSEDTAVYYCARGGIQLWLHFDYWGQGTLVTVSSASTKGPSVFPLAPSS
KSTSGGTAALGCLVKDYFPEPVTVSWNSGALTSGVHTFPAVLQSSGLYSLSSVVTVPSSSLGTQTYICNV
NHKPSNTKVDKKVEPKSCDKTHTCPPCPAPELLGGPSVFLFPPKPKDTLMISRTPEVTCVVVDVSHEDPE
VKFNWYVDGVEVHNAKTKPREEQYNSTYRVVSVLTVLHQDWLNGKEYKCKVSNKALPAPIEKTISKA
KGQPREPQVYTLPPSREEMTKNQVSLTCLVKGFYPSDIAVEWESNGQPENNYKTTPPVLDSDGSFFLYS
KLTVDKSRWQQGNVFSCSVMHEALHNHYTQKSLSLSPGK
SEQ ID NO: 794
14097_HC [hu anti-<huCDH19> 25F8.1 (1-469)(F90Y, W133Y) VH]::huIgG1z
QVQLVQSGAEVKKPGASVKVSCKASGYTFTSYYIHWVRQAPGQGLEWMGIINPSGGSTRYAQKFQGR
VTMTRDTSTSTVYMELSSLRSEDTAVYYCARGGIQLYLHFDYWGQGTLVTVSSASTKGPSVFPLAPSSK
STSGGTAALGCLVKDYFPEPVTVSWNSGALTSGVHTFPAVLQSSGLYSLSSVVTVPSSSLGTQTYICNVN
HKPSNTKVDKKVEPKSCDKTHTCPPCPAPELLGGPSVFLFPPKPKDTLMISRTPEVTCVVVDVSHEDPEV
KFNWYVDGVEVHNAKTKPREEQYNSTYRVVSVLTVLHQDWLNGKEYKCKVSNKALPAPIEKTISKAK
GQPREPQVYTLPPSREEMTKNQVSLTCLVKGFYPSDIAVEWESNGQPENNYKTTPPVLDSDGSFFLYSK
LTVDKSRWQQGNVFSCSVMHEALHNHYTQKSLSLSPGK
SEQ ID NO: 795
14098_HC [hu anti-<huCDH19> 22D1.1 VH]::huIgG1z
QVQLVQSGAEVKKPGASVRVSCKVSGYTFTSYFIHWVRQAPGQGLEWMGIINPISVSTSYAQKFQGRV
TMTRDTSTSTVFMELSSLRSEDTAVYYCARGGIQLWLHLDYWGQGTLVTVSSASTKGPSVFPLAPSSKS
TSGGTAALGCLVKDYFPEPVTVSWNSGALTSGVHTFPAVLQSSGLYSLSSVVTVPSSSLGTQTYICNVN
HKPSNTKVDKKVEPKSCDKTHTCPPCPAPELLGGPSVFLFPPKPKDTLMISRTPEVTCVVVDVSHEDPEV
KFNWYVDGVEVHNAKTKPREEQYNSTYRVVSVLTVLHQDWLNGKEYKCKVSNKALPAPIEKTISKAK
GQPREPQVYTLPPSREEMTKNQVSLTCLVKGFYPSDIAVEWESNGQPENNYKTTPPVLDSDGSFFLYSK
LTVDKSRWQQGNVFSCSVMHEALHNHYTQKSLSLSPGK
SEQ ID NO: 796
14099_HC [hu anti-<huCDH19> 22D1.1 VH]::huIgG1z
QVQLVQSGAEVKKPGASVRVSCKVSGYTFTSYFIHWVRQAPGQGLEWMGIINPISVSTSYAQKFQGRV
TMTRDTSTSTVFMELSSLRSEDTAVYYCARGGIQLWLHLDYWGQGTLVTVSSASTKGPSVFPLAPSSKS
TSGGTAALGCLVKDYFPEPVTVSWNSGALTSGVHTFPAVLQSSGLYSLSSVVTVPSSSLGTQTYICNVN
HKPSNTKVDKKVEPKSCDKTHTCPPCPAPELLGGPSVFLFPPKPKDTLMISRTPEVTCVVVDVSHEDPEV
KFNWYVDGVEVHNAKTKPREEQYNSTYRVVSVLTVLHQDWLNGKEYKCKVSNKALPAPIEKTISKAK
GQPREPQVYTLPPSREEMTKNQVSLTCLVKGFYPSDIAVEWESNGQPENNYKTTPPVLDSDGSFFLYSK
LTVDKSRWQQGNVFSCSVMHEALHNHYTQKSLSLSPGK
SEQ ID NO: 797
14100_HC [hu anti-<huCDH19> 22D1.1 (1-469)(W133Y) VH]::huIgG1z
QVQLVQSGAEVKKPGASVRVSCKVSGYTFTSYFIHWVRQAPGQGLEWMGIINPISVSTSYAQKFQGRV
TMTRDTSTSTVFMELSSLRSEDTAVYYCARGGIQLYLHLDYWGQGTLVTVSSASTKGPSVFPLAPSSKS
TSGGTAALGCLVKDYFPEPVTVSWNSGALTSGVHTFPAVLQSSGLYSLSSVVTVPSSSLGTQTYICNVN
HKPSNTKVDKKVEPKSCDKTHTCPPCPAPELLGGPSVFLFPPKPKDTLMISRTPEVTCVVVDVSHEDPEV
KFNWYVDGVEVHNAKTKPREEQYNSTYRVVSVLTVLHQDWLNGKEYKCKVSNKALPAPIEKTISKAK
GQPREPQVYTLPPSREEMTKNQVSLTCLVKGFYPSDIAVEWESNGQPENNYKTTPPVLDSDGSFFLYSK
LTVDKSRWQQGNVFSCSVMHEALHNHYTQKSLSLSPGK
SEQ ID NO: 798
14101_HC [hu anti-<huCDH19> 22D1.1 (1-469)(W133Y) VH]::huIgG1z
QVQLVQSGAEVKKPGASVRVSCKVSGYTFTSYFIHWVRQAPGQGLEWMGIINPISVSTSYAQKFQGRV
TMTRDTSTSTVFMELSSLRSEDTAVYYCARGGIQLYLHLDYWGQGTLVTVSSASTKGPSVFPLAPSSKS
TSGGTAALGCLVKDYFPEPVTVSWNSGALTSGVHTFPAVLQSSGLYSLSSVVTVPSSSLGTQTYICNVN
HKPSNTKVDKKVEPKSCDKTHTCPPCPAPELLGGPSVFLFPPKPKDTLMISRTPEVTCVVVDVSHEDPEV
KFNWYVDGVEVHNAKTKPREEQYNSTYRVVSVLTVLHQDWLNGKEYKCKVSNKALPAPIEKTISKAK
GQPREPQVYTLPPSREEMTKNQVSLTCLVKGFYPSDIAVEWESNGQPENNYKTTPPVLDSDGSFFLYSK
LTVDKSRWQQGNVFSCSVMHEALHNHYTQKSLSLSPGK
SEQ ID NO: 799
14102_HC [hu anti-<huCDH19> 22D1.1 (1-469)(F90Y) VH]::huIgG1z
QVQLVQSGAEVKKPGASVRVSCKVSGYTFTSYFIHWVRQAPGQGLEWMGIINPISVSTSYAQKFQGRV
TMTRDTSTSTVYMELSSLRSEDTAVYYCARGGIQLWLHLDYWGQGTLVTVSSASTKGPSVFPLAPSSKS
TSGGTAALGCLVKDYFPEPVTVSWNSGALTSGVHTFPAVLQSSGLYSLSSVVTVPSSSLGTQTYICNVN
HKPSNTKVDKKVEPKSCDKTHTCPPCPAPELLGGPSVFLFPPKPKDTLMISRTPEVTCVVVDVSHEDPEV
KFNWYVDGVEVHNAKTKPREEQYNSTYRVVSVLTVLHQDWLNGKEYKCKVSNKALPAPIEKTISKAK
GQPREPQVYTLPPSREEMTKNQVSLTCLVKGFYPSDIAVEWESNGQPENNYKTTPPVLDSDGSFFLYSK
LTVDKSRWQQGNVFSCSVMHEALHNHYTQKSLSLSPGK
SEQ ID NO: 800
13591_HC [hu anti-<huCDH19> 4F7 VH]::huIgG1z
QVQLQESGPGLVKPSETLSLTCTVSGGSISSYSWSWIRQPPGKGLEWIGYIYYSGSTNYNPSLKSRVTISL
DTSKNQFSLKLSSVTAADTAVYYCARNWAFHFDYWGQGTLVTVSSASTKGPSVFPLAPSSKSTSGGTA
ALGCLVKDYFPEPVTVSWNSGALTSGVHTFPAVLQSSGLYSLSSVVTVPSSSLGTQTYICNVNHKPSNT
KVDKKVEPKSCDKTHTCPPCPAPELLGGPSVFLFPPKPKDTLMISRTPEVTCVVVDVSHEDPEVKFNWY
VDGVEVHNAKTKPREEQYNSTYRVVSVLTVLHQDWLNGKEYKCKVSNKALPAPIEKTISKAKGQPREP
QVYTLPPSREEMTKNQVSLTCLVKGFYPSDIAVEWESNGQPENNYKTTPPVLDSDGSFFLYSKLTVDKS
RWQQGNVFSCSVMHEALHNHYTQKSLSLSPGK
SEQ ID NO: 801
14301_HC [hu anti-<huCDH19> 2G6 VH]::huIgG1z
QVQLVESGGGVVQPGRSLRLSCAASGFTFSSYGMHWVRQAPGKGLEWVAFIWYDGSNKYYADSVKD
RFTISRDNSKNTLYLQMKSLRAEDTAVYYCARRAGIIGTIGYYYGMDVWGQGTTVTVSSASTKGPSVFP
LAPSSKSTSGGTAALGCLVKDYFPEPVTVSWNSGALTSGVHTFPAVLQSSGLYSLSSVVTVPSSSLGTQT
YICNVNHKPSNTKVDKKVEPKSCDKTHTCPPCPAPELLGGPSVFLFPPKPKDTLMISRTPEVTCVVVDVS
HEDPEVKFNWYVDGVEVHNAKTKPREEQYNSTYRVVSVLTVLHQDWLNGKEYKCKVSNKALPAPIE
KTISKAKGQPREPQVYTLPPSREEMTKNQVSLTCLVKGFYPSDIAVEWESNGQPENNYKTTPPVLDSDG
SFFLYSKLTVDKSRWQQGNVFSCSVMHEALHNHYTQKSLSLSPGK
SEQ ID NO: 802
14302_HC [hu anti-<huCDH19> 2G6 (1-477)(R17G, K94N) VH]::huIgG1z
QVQLVESGGGVVQPGGSLRLSCAASGFTFSSYGMHWVRQAPGKGLEWVAFIWYDGSNKYYADSVKD
RFTISRDNSKNTLYLQMNSLRAEDTAVYYCARRAGIIGTIGYYYGMDVWGQGTTVTVSSASTKGPSVFP
LAPSSKSTSGGTAALGCLVKDYFPEPVTVSWNSGALTSGVHTFPAVLQSSGLYSLSSVVTVPSSSLGTQT
YICNVNHKPSNTKVDKKVEPKSCDKTHTCPPCPAPELLGGPSVFLFPPKPKDTLMISRTPEVTCVVVDVS
HEDPEVKFNWYVDGVEVHNAKTKPREEQYNSTYRVVSVLTVLHQDWLNGKEYKCKVSNKALPAPIE
KTISKAKGQPREPQVYTLPPSREEMTKNQVSLTCLVKGFYPSDIAVEWESNGQPENNYKTTPPVLDSDG
SFFLYSKLTVDKSRWQQGNVFSCSVMHEALHNHYTQKSLSLSPGK
SEQ ID NO: 803
14303_HC [hu anti-<huCDH19> 2G6 (1-477)(D61E, D72E) VH]::huIgG1z
QVQLVESGGGVVQPGRSLRLSCAASGFTFSSYGMHWVRQAPGKGLEWVAFIWYEGSNKYYAESVKD
RFTISRDNSKNTLYLQMKSLRAEDTAVYYCARRAGIIGTIGYYYGMDVWGQGTTVTVSSASTKGPSVFP
LAPSSKSTSGGTAALGCLVKDYFPEPVTVSWNSGALTSGVHTFPAVLQSSGLYSLSSVVTVPSSSLGTQT
YICNVNHKPSNTKVDKKVEPKSCDKTHTCPPCPAPELLGGPSVFLFPPKPKDTLMISRTPEVTCVVVDVS
HEDPEVKFNWYVDGVEVHNAKTKPREEQYNSTYRVVSVLTVLHQDWLNGKEYKCKVSNKALPAPIE
KTISKAKGQPREPQVYTLPPSREEMTKNQVSLTCLVKGFYPSDIAVEWESNGQPENNYKTTPPVLDSDG
SFFLYSKLTVDKSRWQQGNVFSCSVMHEALHNHYTQKSLSLSPGK
SEQ ID NO: 804
14304_HC [hu anti-<huCDH19> 2G6 (1-477)(R17G) VH]::huIgG1z
QVQLVESGGGVVQPGGSLRLSCAASGFTFSSYGMHWVRQAPGKGLEWVAFIWYDGSNKYYADSVKD
RFTISRDNSKNTLYLQMKSLRAEDTAVYYCARRAGIIGTIGYYYGMDVWGQGTTVTVSSASTKGPSVFP
LAPSSKSTSGGTAALGCLVKDYFPEPVTVSWNSGALTSGVHTFPAVLQSSGLYSLSSVVTVPSSSLGTQT
YICNVNHKPSNTKVDKKVEPKSCDKTHTCPPCPAPELLGGPSVFLFPPKPKDTLMISRTPEVTCVVVDVS
HEDPEVKFNWYVDGVEVHNAKTKPREEQYNSTYRVVSVLTVLHQDWLNGKEYKCKVSNKALPAPIE
KTISKAKGQPREPQVYTLPPSREEMTKNQVSLTCLVKGFYPSDIAVEWESNGQPENNYKTTPPVLDSDG
SFFLYSKLTVDKSRWQQGNVFSCSVMHEALHNHYTQKSLSLSPGK
SEQ ID NO: 805

TABLE IIId
Light Chain Variable and Contant Region Polynucleotide and Amino
acid Sequences

13586_LC [hu anti-<huCDH19> 4F3 VL]::huKLC
EIVLTQSPGTLSLSPGERATLSCRASQSVSSSYLAWYQQKPGQAPRLLIYGASSRATGIPDRFSGSGSGTD
FTLTISRLEPEDFAVYYCQQYGSSWTFGQGTKVEIKRTVAAPSVFIFPPSDEQLKSGTASVVCLLNNFYP
REAKVQWKVDNALQSGNSQESVTEQDSKDSTYSLSSTLTLSKADYEKHKVYACEVTHQGLSSPVTKSF
NRGEC
SEQ ID NO: 806
13589_LC [hu anti-<huCDH19> 4A9 VL]::huLLC-C1
QSVLTQPPSVSGAPGQRVTISCTGSSSNIGTGYAVHWYQQFPGTAPKLLIYGNNNRPSGVPDRFSGSKSG
TSASLAITGLQAEDEADYYCQSYDSRLSGWVFGGGTKLTVLGQPKANPTVTLFPPSSEELQANKATLVC
LISDFYPGAVTVAWKADGSPVKAGVETTKPSKQSNNKYAASSYLSLTPEQWKSHRSYSCQVTHEGSTV
EKTVAPTECS
SEQ ID NO: 807
13590_LC [hu anti-<huCDH19> 4B10 VL]::huKLC
EIVLTQSPGTLSLSPGERATLSCRASQSVSNTYLAWYHQRPGQAPRLLIYGASSRATGIPDRFSGSGSGTD
FALTISSLEPEDFAVYYCQQYSNSWTFGQGTKVEIKRTVAAPSVFIFPPSDEQLKSGTASVVCLLNNFYP
REAKVQWKVDNALQSGNSQESVTEQDSKDSTYSLSSTLTLSKADYEKHKVYACEVTHQGLSSPVTKSF
NRGEC
SEQ ID NO: 808
13874_LC [hu anti-<huCDH19> 17H8.2 VL]::huKLC
DIVLTQSPGTLSLSPGERATLSCRASQSVAGSYLAWYQQKPGQAPRLLISGASSRATGIPDRFSGSGSGT
DFTLTISRLEPEDFAVYYCQQYGKSPITFGQGTRLEMKGTVAAPSVFIFPPSDEQLKSGTASVVCLLNNF
YPREAKVQWKVDNALQSGNSQESVTEQDSKDSTYSLSSTLTLSKADYEKHKVYACEVTHQGLSSPVTK
SFNRGEC
SEQ ID NO: 809
13875_LC [hu anti-<huCDH19> 16C1.1 VL]::huKLC
EIVLTQSPGTLSLSPGERATLSCRASQSVSSSYLAWYQQKPGQAPRLLIFGASSRATGIPDRFSGSGSGTD
FTLTISGLEPEDFAVYHCQQYGNSPLTFGGGTKVEIKRTVAAPSVFIFPPSDEQLKSGTASVVCLLNNFYP
REAKVQWKVDNALQSGNSQESVTEQDSKDSTYSLSSTLTLSKADYEKHKVYACEVTHQGLSSPVTKSF
NRGEC
SEQ ID NO: 810
13876_LC [hu anti-<huCDH19> 16A4.1 VL]::huKLC
EIVLTQSPGTLSLSPGERATLSCRASQSVSSSYLAWYQQKPGQAPRLLIYGTSSRATGIPDRFSGSGSGTD
FTLTISRLEPEDFAVYYCQQYGSSPFTFGGGTKVEIKRTVAAPSVFIFPPSDEQLKSGTASVVCLLNNFYP
REAKVQWKVDNALQSGNSQESVTEQDSKDSTYSLSSTLTLSKADYEKHKVYACEVTHQGLSSPVTKSF
NRGEC
SEQ ID NO: 811
13877_LC [hu anti-<huCDH19> 22G10.1 VL]::huKLC
EIVMTQSPVTLSLSLGERATLSCRASQSISSNLAWFQQKPGQAPRLLIYGAFTRATGIPARVSGSGSGTEF
TLTISSLQSEDFAVYYCQQYNYWPLTFGGGTKVEIKRTVAAPSVFIFPPSDEQLKSGTASVVCLLNNFYP
REAKVQWKVDNALQSGNSQESVTEQDSKDSTYSLSSTLTLSKADYEKHKVYACEVTHQGLSSPVTKSF
NRGEC
SEQ ID NO: 812
13878_LC [hu anti-<huCDH19> 20D3.1 VL]::huLLC-C2
QSALTQPPSATGTPGQRVTISCSGSSSNIGSNFVNWYKQLPGTAPKVLIYTNNQRPSGVPDRFSGSKSGTS
ASLAISGLQSEDESDYYCATWDDSLNGWVFGGGTKLTVLGQPKAAPSVTLFPPSSEELQANKATLVCLI
SDFYPGAVTVAWKADSSPVKAGVETTTPSKQSNNKYAASSYLSLTPEQWKSHRSYSCQVTHEGSTVEK
TVAPTECS
SEQ ID NO: 813
13879_LC [hu anti-<huCDH19> 22D1.1 VL]::huLLC-C2
QSALTQPPSATGTPGQRVTISCSGSSSNIGSNFVNWYKQLPGTAPKVLIYTNNQRPSGVPDRFSGSKSGTS
ASLAISGLQSEDESDYYCATWDDSMNGWVFGGGTKLTVLGQPKAAPSVTLFPPSSEELQANKATLVCLI
SDFYPGAVTVAWKADSSPVKAGVETTTPSKQSNNKYAASSYLSLTPEQWKSHRSYSCQVTHEGSTVEK
TVAPTECS
SEQ ID NO: 814
13880_LC [hu anti-<huCDH19> 25F8.1 VL]::huLLC-C2
QSALTQPPSATGTPGQRVTISCSGSSSNIGRNFVNWYKQLPGTAPKVLIYTNNQRPSGVPDRFSGSKSGT
SASLAISGLQSEDESDYYCAAWDDSLNGWVFGGGTKLTVLGQPKAAPSVTLFPPSSEELQANKATLVC
LISDFYPGAVTVAWKADSSPVKAGVETTTPSKQSNNKYAASSYLSLTPEQWKSHRSYSCQVTHEGSTV
EKTVAPTECS
SEQ ID NO: 815
13881_LC [hu anti-<huCDH19> 26F12.1 VL]::huLLC-C2
QSVLTQSPSASGTPGQKVTISCSGSRSNIGSNFVNWYQQLPGTAPKLLIYTNYQRPSGVPDRFSGSKSGTS
ASLAISGLQSEDEADYYCAVWDDSLNGWVFGGGTKLTVLGQPKAAPSVTLFPPSSEELQANKATLVCLI
SDFYPGAVTVAWKADSSPVKAGVETTTPSKQSNNKYAASSYLSLTPEQWKSHRSYSCQVTHEGSTVEK
TVAPTECS
SEQ ID NO: 816
13882_LC [hu anti-<huCDH19> 26D1.1 VL]::huLLC-C2
HSVLTQSPSASGTPGQRVTISCSGSRSNIGSNFVNWYQQLPGTAPKLLIYTNNQRPSGVPDRFSGSKSGTS
ASLAISGLQSEDEADYYCAVWDDSLNGWVFGGGTKLTVLGQPKAAPSVTLFPPSSEELQANKATLVCLI
SDFYPGAVTVAWKADSSPVKAGVETTTPSKQSNNKYAASSYLSLTPEQWKSHRSYSCQVTHEGSTVEK
TVAPTECS
SEQ ID NO: 817
13883_LC [hu anti-<huCDH19> 25G10.1 VL]::huKLC
EIVLTQSPGTLSLSPGERATLSCRASQSVSSSYLAWYQQKPGQAPRLLIFGASSRATGIPDRFSGSGSGTD
FTLTISRLEPEDFAVYHCQQYGNSPLTFGGGTKVEIKRTVAAPSVFIFPPSDEQLKSGTASVVCLLNNFYP
REAKVQWKVDNALQSGNSQESVTEQDSKDSTYSLSSTLTLSKADYEKHKVYACEVTHQGLSSPVTKSF
NRGEC
SEQ ID NO: 818
13885_LC [hu anti-<huCDH19> 19B5.1 VL]::huLLC-C2
QSALTQPPSTTGTPGQRVTISCSGSRSNIGSNFVNWYKQLPGTAPKVLIYTNNQRPSGVPDRFSGSKSGTS
ASLAISGLQSEDESDYYCATWDDSMNGWVFGGGTKLTVLGQPKAAPSVTLFPPSSEELQANKATLVCLI
SDFYPGAVTVAWKADSSPVKAGVETTTPSKQSNNKYAASSYLSLTPEQWKSHRSYSCQVTHEGSTVEK
TVAPTECS
SEQ ID NO: 819
14022_LC [hu anti-<huCDH19> 4A2 (1-236)(N30Q) VL]::huKLC
EIVLTQSPGTLSLSPGERATLSCRASRQISSSYLAWYQQKPGQAPRLLIYGPSSRATGIPDRFSGSGSGTDF
TLTISRLEPEDFTVYYCQQYGSSFTFGPGTKVDIKRTVAAPSVFIFPPSDEQLKSGTASVVCLLNNFYPRE
AKVQWKVDNALQSGNSQESVTEQDSKDSTYSLSSTLTLSKADYEKHKVYACEVTHQGLSSPVTKSFNR
GEC
SEQ ID NO: 820
14024_LC [hu anti-<huCDH19> 4A2 (1-236)(N30Q, T102A, P141Q) VL]::huKLC
EIVLTQSPGTLSLSPGERATLSCRASRQISSSYLAWYQQKPGQAPRLLIYGPSSRATGIPDRFSGSGSGTDF
TLTISRLEPEDFAVYYCQQYGSSFTFGQGTKVDIKRTVAAPSVFIFPPSDEQLKSGTASVVCLLNNFYPRE
AKVQWKVDNALQSGNSQESVTEQDSKDSTYSLSSTLTLSKADYEKHKVYACEVTHQGLSSPVTKSFNR
GEC
SEQ ID NO: 821
14025_LC [hu anti-<huCDH19> 4A2 (1-236)(N30Q, T102A) VL]::huKLC
EIVLTQSPGTLSLSPGERATLSCRASRQISSSYLAWYQQKPGQAPRLLIYGPSSRATGIPDRFSGSGSGTDF
TLTISRLEPEDFAVYYCQQYGSSFTFGPGTKVDIKRTVAAPSVFIFPPSDEQLKSGTASVVCLLNNFYPRE
AKVQWKVDNALQSGNSQESVTEQDSKDSTYSLSSTLTLSKADYEKHKVYACEVTHQGLSSPVTKSFNR
GEC
SEQ ID NO: 822
14026_LC [hu anti-<huCDH19> 4A2 (1-236)(N30Q, T102A) VL]::huKLC
EIVLTQSPGTLSLSPGERATLSCRASRQISSSYLAWYQQKPGQAPRLLIYGPSSRATGIPDRFSGSGSGTDF
TLTISRLEPEDFAVYYCQQYGSSFTFGPGTKVDIKRTVAAPSVFIFPPSDEQLKSGTASVVCLLNNFYPRE
AKVQWKVDNALQSGNSQESVTEQDSKDSTYSLSSTLTLSKADYEKHKVYACEVTHQGLSSPVTKSFNR
GEC
SEQ ID NO: 823
14027_LC [hu anti-<huCDH19> 4A2 (1-236)(N30Q, T102A, P141Q) VL]::huKLC
EIVLTQSPGTLSLSPGERATLSCRASRQISSSYLAWYQQKPGQAPRLLIYGPSSRATGIPDRFSGSGSGTDF
TLTISRLEPEDFAVYYCQQYGSSFTFGQGTKVDIKRTVAAPSVFIFPPSDEQLKSGTASVVCLLNNFYPRE
AKVQWKVDNALQSGNSQESVTEQDSKDSTYSLSSTLTLSKADYEKHKVYACEVTHQGLSSPVTKSFNR
GEC
SEQ ID NO: 824
14028_LC [hu anti-<huCDH19> 4A2 (1-236)(N30Q, T102A, P141Q) VL]::huKLC
EIVLTQSPGTLSLSPGERATLSCRASRQISSSYLAWYQQKPGQAPRLLIYGPSSRATGIPDRFSGSGSGTDF
TLTISRLEPEDFAVYYCQQYGSSFTFGQGTKVDIKRTVAAPSVFIFPPSDEQLKSGTASVVCLLNNFYPRE
AKVQWKVDNALQSGNSQESVTEQDSKDSTYSLSSTLTLSKADYEKHKVYACEVTHQGLSSPVTKSFNR
GEC
SEQ ID NO: 825
14029_LC [hu anti-<huCDH19> 4A2 (1-236)(R29Q, N30S) VL]::huKLC
EIVLTQSPGTLSLSPGERATLSCRASQSISSSYLAWYQQKPGQAPRLLIYGPSSRATGIPDRFSGSGSGTDF
TLTISRLEPEDFTVYYCQQYGSSFTFGPGTKVDIKRTVAAPSVFIFPPSDEQLKSGTASVVCLLNNFYPRE
AKVQWKVDNALQSGNSQESVTEQDSKDSTYSLSSTLTLSKADYEKHKVYACEVTHQGLSSPVTKSFNR
GEC
SEQ ID NO: 826
14030_LC [hu anti-<huCDH19> 4F3 VL]::huKLC
EIVLTQSPGTLSLSPGERATLSCRASQSVSSSYLAWYQQKPGQAPRLLIYGASSRATGIPDRFSGSGSGTD
FTLTISRLEPEDFAVYYCQQYGSSWTFGQGTKVEIKRTVAAPSVFIFPPSDEQLKSGTASVVCLLNNFYP
REAKVQWKVDNALQSGNSQESVTEQDSKDSTYSLSSTLTLSKADYEKHKVYACEVTHQGLSSPVTKSF
NRGEC
SEQ ID NO: 827
14031_LC [hu anti-<huCDH19> 4F3 VL]::huKLC
EIVLTQSPGTLSLSPGERATLSCRASQSVSSSYLAWYQQKPGQAPRLLIYGASSRATGIPDRFSGSGSGTD
FTLTISRLEPEDFAVYYCQQYGSSWTFGQGTKVEIKRTVAAPSVFIFPPSDEQLKSGTASVVCLLNNFYP
REAKVQWKVDNALQSGNSQESVTEQDSKDSTYSLSSTLTLSKADYEKHKVYACEVTHQGLSSPVTKSF
NRGEC
SEQ ID NO: 828
14032_LC [hu anti-<huCDH19> 4F3 VL]::huKLC
EIVLTQSPGTLSLSPGERATLSCRASQSVSSSYLAWYQQKPGQAPRLLIYGASSRATGIPDRFSGSGSGTD
FTLTISRLEPEDFAVYYCQQYGSSWTFGQGTKVEIKRTVAAPSVFIFPPSDEQLKSGTASVVCLLNNFYP
REAKVQWKVDNALQSGNSQESVTEQDSKDSTYSLSSTLTLSKADYEKHKVYACEVTHQGLSSPVTKSF
NRGEC
SEQ ID NO: 829
14033_LC [hu anti-<huCDH19> 4F3 VL]::huKLC
EIVLTQSPGTLSLSPGERATLSCRASQSVSSSYLAWYQQKPGQAPRLLIYGASSRATGIPDRFSGSGSGTD
FTLTISRLEPEDFAVYYCQQYGSSWTFGQGTKVEIKRTVAAPSVFIFPPSDEQLKSGTASVVCLLNNFYP
REAKVQWKVDNALQSGNSQESVTEQDSKDSTYSLSSTLTLSKADYEKHKVYACEVTHQGLSSPVTKSF
NRGEC
SEQ ID NO: 830
14034_LC [hu anti-<huCDH19> 4F3 VL]::huKLC
EIVLTQSPGTLSLSPGERATLSCRASQSVSSSYLAWYQQKPGQAPRLLIYGASSRATGIPDRFSGSGSGTD
FTLTISRLEPEDFAVYYCQQYGSSWTFGQGTKVEIKRTVAAPSVFIFPPSDEQLKSGTASVVCLLNNFYP
REAKVQWKVDNALQSGNSQESVTEQDSKDSTYSLSSTLTLSKADYEKHKVYACEVTHQGLSSPVTKSF
NRGEC
SEQ ID NO: 831
14039_LC [hu anti-<huCDH19> 2G6 (1-234)(C42S, D110E) VL]::huLLC-C1
SYELTQPPSVSVSPGQTASITCSGDRLGEKYTSWYQQRPGQSPLLVIYQDTKRPSGIPERFSGSNSGNTAT
LTISGTQAMDEADYYCQAWESSTVVFGGGTKLTVLGQPKANPTVTLFPPSSEELQANKATLVCLISDFY
PGAVTVAWKADGSPVKAGVETTKPSKQSNNKYAASSYLSLTPEQWKSHRSYSCQVTHEGSTVEKTVA
PTECS
SEQ ID NO: 832
14040_LC [hu anti-<huCDH19> 16C1.1 (1-235)(H105Y) VL]::huKLC
EIVLTQSPGTLSLSPGERATLSCRASQSVSSSYLAWYQQKPGQAPRLLIFGASSRATGIPDRFSGSGSGTD
FTLTISGLEPEDFAVYYCQQYGNSPLTFGGGTKVEIKRTVAAPSVFIFPPSDEQLKSGTASVVCLLNNFYP
REAKVQWKVDNALQSGNSQESVTEQDSKDSTYSLSSTLTLSKADYEKHKVYACEVTHQGLSSPVTKSF
NRGEC
SEQ ID NO: 833
14041_LC [hu anti-<huCDH19> 16C1.1 (1-235)(H105Y) VL]::huKLC
EIVLTQSPGTLSLSPGERATLSCRASQSVSSSYLAWYQQKPGQAPRLLIFGASSRATGIPDRFSGSGSGTD
FTLTISGLEPEDFAVYYCQQYGNSPLTFGGGTKVEIKRTVAAPSVFIFPPSDEQLKSGTASVVCLLNNFYP
REAKVQWKVDNALQSGNSQESVTEQDSKDSTYSLSSTLTLSKADYEKHKVYACEVTHQGLSSPVTKSF
NRGEC
SEQ ID NO: 834
14042_LC [hu anti-<huCDH19> 16C1.1 (1-235)(H105Y) VL]::huKLC
EIVLTQSPGTLSLSPGERATLSCRASQSVSSSYLAWYQQKPGQAPRLLIFGASSRATGIPDRFSGSGSGTD
FTLTISGLEPEDFAVYYCQQYGNSPLTFGGGTKVEIKRTVAAPSVFIFPPSDEQLKSGTASVVCLLNNFYP
REAKVQWKVDNALQSGNSQESVTEQDSKDSTYSLSSTLTLSKADYEKHKVYACEVTHQGLSSPVTKSF
NRGEC
SEQ ID NO: 835
14043_LC [hu anti-<huCDH19> 16C1.1 (1-235)(H105Y) VL]::huKLC
EIVLTQSPGTLSLSPGERATLSCRASQSVSSSYLAWYQQKPGQAPRLLIFGASSRATGIPDRFSGSGSGTD
FTLTISGLEPEDFAVYYCQQYGNSPLTFGGGTKVEIKRTVAAPSVFIFPPSDEQLKSGTASVVCLLNNFYP
REAKVQWKVDNALQSGNSQESVTEQDSKDSTYSLSSTLTLSKADYEKHKVYACEVTHQGLSSPVTKSF
NRGEC
SEQ ID NO: 836
14044_LC [hu anti-<huCDH19> 16C1.1 (1-235)(G95R, H105Y, G141Q) VL]::huKLC
EIVLTQSPGTLSLSPGERATLSCRASQSVSSSYLAWYQQKPGQAPRLLIFGASSRATGIPDRFSGSGSGTD
FTLTISRLEPEDFAVYYCQQYGNSPLTFGQGTKVEIKRTVAAPSVFIFPPSDEQLKSGTASVVCLLNNFYP
REAKVQWKVDNALQSGNSQESVTEQDSKDSTYSLSSTLTLSKADYEKHKVYACEVTHQGLSSPVTKSF
NRGEC
SEQ ID NO: 837
14045_LC [hu anti-<huCDH19> 17H8.2 (1-235)(G149R) VL]::huKLC
DIVLTQSPGTLSLSPGERATLSCRASQSVAGSYLAWYQQKPGQAPRLLISGASSRATGIPDRFSGSGSGT
DFTLTISRLEPEDFAVYYCQQYGKSPITFGQGTRLEMKRTVAAPSVFIFPPSDEQLKSGTASVVCLLNNF
YPREAKVQWKVDNALQSGNSQESVTEQDSKDSTYSLSSTLTLSKADYEKHKVYACEVTHQGLSSPVTK
SFNRGEC
SEQ ID NO: 838
14046_LC [hu anti-<huCDH19> 17H8.2 (1-235)(G149R) VL]::huKLC
DIVLTQSPGTLSLSPGERATLSCRASQSVAGSYLAWYQQKPGQAPRLLISGASSRATGIPDRFSGSGSGT
DFTLTISRLEPEDFAVYYCQQYGKSPITFGQGTRLEMKRTVAAPSVFIFPPSDEQLKSGTASVVCLLNNF
YPREAKVQWKVDNALQSGNSQESVTEQDSKDSTYSLSSTLTLSKADYEKHKVYACEVTHQGLSSPVTK
SFNRGEC
SEQ ID NO: 839
14047_LC [hu anti-<huCDH19> 17H8.2 (1-235)(G149R) VL]::huKLC
DIVLTQSPGTLSLSPGERATLSCRASQSVAGSYLAWYQQKPGQAPRLLISGASSRATGIPDRFSGSGSGT
DFTLTISRLEPEDFAVYYCQQYGKSPITFGQGTRLEMKRTVAAPSVFIFPPSDEQLKSGTASVVCLLNNF
YPREAKVQWKVDNALQSGNSQESVTEQDSKDSTYSLSSTLTLSKADYEKHKVYACEVTHQGLSSPVTK
SFNRGEC
SEQ ID NO: 840
14048_LC [hu anti-<huCDH19> 17H8.2 (1-235)(S57Y, G149R) VL]::huKLC
DIVLTQSPGTLSLSPGERATLSCRASQSVAGSYLAWYQQKPGQAPRLLIYGASSRATGIPDRFSGSGSGT
DFTLTISRLEPEDFAVYYCQQYGKSPITFGQGTRLEMKRTVAAPSVFIFPPSDEQLKSGTASVVCLLNNF
YPREAKVQWKVDNALQSGNSQESVTEQDSKDSTYSLSSTLTLSKADYEKHKVYACEVTHQGLSSPVTK
SFNRGEC
SEQ ID NO: 841
14049_LC [hu anti-<huCDH19> 4F7 (1-239)(H57Y) VL]::huLLC-C2
QSVLTQPPSVSGAPGQRVTISCTGSSSNIGTGYDVHWYQQLPGTAPKLLIYGNSNRPSGVPDRFSGSKSG
TSASLAITGLQAEDEADYYCQSYDSSLSGWVFGGGTRLTVLGQPKANPTVTLFPPSSEELQANKATLVC
LISDFYPGAVTVAWKADGSPVKAGVETTKPSKQSNNKYAASSYLSLTPEQWKSHRSYSCQVTHEGSTV
EKTVAPTECS
SEQ ID NO: 842
14050_LC [hu anti-<huCDH19> 4F7 (1-239)(H57Y, D110E) VL]::huLLC-C2
QSVLTQPPSVSGAPGQRVTISCTGSSSNIGTGYDVHWYQQLPGTAPKLLIYGNSNRPSGVPDRFSGSKSG
TSASLAITGLQAEDEADYYCQSYESSLSGWVFGGGTRLTVLGQPKANPTVTLFPPSSEELQANKATLVC
LISDFYPGAVTVAWKADGSPVKAGVETTKPSKQSNNKYAASSYLSLTPEQWKSHRSYSCQVTHEGSTV
EKTVAPTECS
SEQ ID NO: 843
14051_LC [hu anti-<huCDH19> 4F7 (1-239)(D110E) VL]::huLLC-C2
QSVLTQPPSVSGAPGQRVTISCTGSSSNIGTGYDVHWYQQLPGTAPKLLIHGNSNRPSGVPDRFSGSKSG
TSASLAITGLQAEDEADYYCQSYESSLSGWVFGGGTRLTVLGQPKANPTVTLFPPSSEELQANKATLVC
LISDFYPGAVTVAWKADGSPVKAGVETTKPSKQSNNKYAASSYLSLTPEQWKSHRSYSCQVTHEGSTV
EKTVAPTECS
SEQ ID NO: 844
14052_LC [hu anti-<huCDH19> 4B10 (1-236)(H45Q, A90T) VL]::huKLC
EIVLTQSPGTLSLSPGERATLSCRASQSVSNTYLAWYQQRPGQAPRLLIYGASSRATGIPDRFSGSGSGTD
FTLTISSLEPEDFAVYYCQQYSNSWTFGQGTKVEIKRTVAAPSVFIFPPSDEQLKSGTASVVCLLNNFYPR
EAKVQWKVDNALQSGNSQESVTEQDSKDSTYSLSSTLTLSKADYEKHKVYACEVTHQGLSSPVTKSFN
RGEC
SEQ ID NO: 845
14053_LC [hu anti-<huCDH19> 4B10 (1-236)(H45Q, A90T) VL]::huKLC
EIVLTQSPGTLSLSPGERATLSCRASQSVSNTYLAWYQQRPGQAPRLLIYGASSRATGIPDRFSGSGSGTD
FTLTISSLEPEDFAVYYCQQYSNSWTFGQGTKVEIKRTVAAPSVFIFPPSDEQLKSGTASVVCLLNNFYPR
EAKVQWKVDNALQSGNSQESVTEQDSKDSTYSLSSTLTLSKADYEKHKVYACEVTHQGLSSPVTKSFN
RGEC
SEQ ID NO: 846
14054_LC [hu anti-<huCDH19> 4B10 (1-236)(H45Q, A90T) VL]::huKLC
EIVLTQSPGTLSLSPGERATLSCRASQSVSNTYLAWYQQRPGQAPRLLIYGASSRATGIPDRFSGSGSGTD
FTLTISSLEPEDFAVYYCQQYSNSWTFGQGTKVEIKRTVAAPSVFIFPPSDEQLKSGTASVVCLLNNFYPR
EAKVQWKVDNALQSGNSQESVTEQDSKDSTYSLSSTLTLSKADYEKHKVYACEVTHQGLSSPVTKSFN
RGEC
SEQ ID NO: 847
14055_LC [hu anti-<huCDH19> 4B10 (1-236)(H45Q, A90T) VL]::huKLC
EIVLTQSPGTLSLSPGERATLSCRASQSVSNTYLAWYQQRPGQAPRLLIYGASSRATGIPDRFSGSGSGTD
FTLTISSLEPEDFAVYYCQQYSNSWTFGQGTKVEIKRTVAAPSVFIFPPSDEQLKSGTASVVCLLNNFYPR
EAKVQWKVDNALQSGNSQESVTEQDSKDSTYSLSSTLTLSKADYEKHKVYACEVTHQGLSSPVTKSFN
RGEC
SEQ ID NO: 848
14056_LC [hu anti-<huCDH19> 4A9 (1-239)(F47L) VL]::huLLC-C1
QSVLTQPPSVSGAPGQRVTISCTGSSSNIGTGYAVHWYQQLPGTAPKLLIYGNNNRPSGVPDRFSGSKSG
TSASLAITGLQAEDEADYYCQSYDSRLSGWVFGGGTKLTVLGQPKANPTVTLFPPSSEELQANKATLVC
LISDFYPGAVTVAWKADGSPVKAGVETTKPSKQSNNKYAASSYLSLTPEQWKSHRSYSCQVTHEGSTV
EKTVAPTECS
SEQ ID NO: 849
14057_LC [hu anti-<huCDH19> 4A9 (1-239)(F47L) VL]::huLLC-C1
QSVLTQPPSVSGAPGQRVTISCTGSSSNIGTGYAVHWYQQLPGTAPKLLIYGNNNRPSGVPDRFSGSKSG
TSASLAITGLQAEDEADYYCQSYDSRLSGWVFGGGTKLTVLGQPKANPTVTLFPPSSEELQANKATLVC
LISDFYPGAVTVAWKADGSPVKAGVETTKPSKQSNNKYAASSYLSLTPEQWKSHRSYSCQVTHEGSTV
EKTVAPTECS
SEQ ID NO: 850
14058_LC [hu anti-<huCDH19> 4A9 (1-239)(F47L, D110E) VL]::huLLC-C1
QSVLTQPPSVSGAPGQRVTISCTGSSSNIGTGYAVHWYQQLPGTAPKLLIYGNNNRPSGVPDRFSGSKSG
TSASLAITGLQAEDEADYYCQSYESRLSGWVFGGGTKLTVLGQPKANPTVTLFPPSSEELQANKATLVC
LISDFYPGAVTVAWKADGSPVKAGVETTKPSKQSNNKYAASSYLSLTPEQWKSHRSYSCQVTHEGSTV
EKTVAPTECS
SEQ ID NO: 851
14059_LC [hu anti-<huCDH19> 4A9 (1-239)(F47L, D110E) VL]::huLLC-C1
QSVLTQPPSVSGAPGQRVTISCTGSSSNIGTGYAVHWYQQLPGTAPKLLIYGNNNRPSGVPDRFSGSKSG
TSASLAITGLQAEDEADYYCQSYESRLSGWVFGGGTKLTVLGQPKANPTVTLFPPSSEELQANKATLVC
LISDFYPGAVTVAWKADGSPVKAGVETTKPSKQSNNKYAASSYLSLTPEQWKSHRSYSCQVTHEGSTV
EKTVAPTECS
SEQ ID NO: 852
14060_LC [hu anti-<huCDH19> 20D3.1 (1-235)(S102A) VL]::huLLC-C2
QSALTQPPSATGTPGQRVTISCSGSSSNIGSNFVNWYKQLPGTAPKVLIYTNNQRPSGVPDRFSGSKSGTS
ASLAISGLQSEDEADYYCATWDDSLNGWVFGGGTKLTVLGQPKAAPSVTLFPPSSEELQANKATLVCLI
SDFYPGAVTVAWKADSSPVKAGVETTTPSKQSNNKYAASSYLSLTPEQWKSHRSYSCQVTHEGSTVEK
TVAPTECS
SEQ ID NO: 853
14061_LC [hu anti-<huCDH19> 20D3.1 (1-235)(K45Q, S102A) VL]::huLLC-C2
QSALTQPPSATGTPGQRVTISCSGSSSNIGSNFVNWYQQLPGTAPKVLIYTNNQRPSGVPDRFSGSKSGTS
ASLAISGLQSEDEADYYCATWDDSLNGWVFGGGTKLTVLGQPKAAPSVTLFPPSSEELQANKATLVCLI
SDFYPGAVTVAWKADSSPVKAGVETTTPSKQSNNKYAASSYLSLTPEQWKSHRSYSCQVTHEGSTVEK
TVAPTECS
SEQ ID NO: 854
14062_LC [hu anti-<huCDH19> 20D3.1 (1-235)(K45Q, S102A) VL]::huLLC-C2
QSALTQPPSATGTPGQRVTISCSGSSSNIGSNFVNWYQQLPGTAPKVLIYTNNQRPSGVPDRFSGSKSGTS
ASLAISGLQSEDEADYYCATWDDSLNGWVFGGGTKLTVLGQPKAAPSVTLFPPSSEELQANKATLVCLI
SDFYPGAVTVAWKADSSPVKAGVETTTPSKQSNNKYAASSYLSLTPEQWKSHRSYSCQVTHEGSTVEK
TVAPTECS
SEQ ID NO: 855
14063_LC [hu anti-<huCDH19> 20D3.1 (1-235)(K45Q, S102A, D111E, N135Q) VL]::
huLLC-C2
QSALTQPPSATGTPGQRVTISCSGSSSNIGSNFVNWYQQLPGTAPKVLIYTNNQRPSGVPDRFSGSKSGTS
ASLAISGLQSEDEADYYCATWDESLQGWVFGGGTKLTVLGQPKAAPSVTLFPPSSEELQANKATLVCLI
SDFYPGAVTVAWKADSSPVKAGVETTTPSKQSNNKYAASSYLSLTPEQWKSHRSYSCQVTHEGSTVEK
TVAPTECS
SEQ ID NO: 856
14064_LC [hu anti-<huCDH19> 20D3.1 (1-235)(W109Y) VL]::huLLC-C2
QSALTQPPSATGTPGQRVTISCSGSSSNIGSNFVNWYKQLPGTAPKVLIYTNNQRPSGVPDRFSGSKSGTS
ASLAISGLQSEDESDYYCATYDDSLNGWVFGGGTKLTVLGQPKAAPSVTLFPPSSEELQANKATLVCLI
SDFYPGAVTVAWKADSSPVKAGVETTTPSKQSNNKYAASSYLSLTPEQWKSHRSYSCQVTHEGSTVEK
TVAPTECS
SEQ ID NO: 857
14065_LC [hu anti-<huCDH19> 22G10.1 VL]::huKLC
EIVMTQSPVTLSLSLGERATLSCRASQSISSNLAWFQQKPGQAPRLLIYGAFTRATGIPARVSGSGSGTEF
TLTISSLQSEDFAVYYCQQYNYWPLTFGGGTKVEIKRTVAAPSVFIFPPSDEQLKSGTASVVCLLNNFYP
REAKVQWKVDNALQSGNSQESVTEQDSKDSTYSLSSTLTLSKADYEKHKVYACEVTHQGLSSPVTKSF
NRGEC
SEQ ID NO: 858
14066_LC [hu anti-<huCDH19> 22G10.1 VL]::huKLC
EIVMTQSPVTLSLSLGERATLSCRASQSISSNLAWFQQKPGQAPRLLIYGAFTRATGIPARVSGSGSGTEF
TLTISSLQSEDFAVYYCQQYNYWPLTFGGGTKVEIKRTVAAPSVFIFPPSDEQLKSGTASVVCLLNNFYP
REAKVQWKVDNALQSGNSQESVTEQDSKDSTYSLSSTLTLSKADYEKHKVYACEVTHQGLSSPVTKSF
NRGEC
SEQ ID NO: 859
14067_LC [hu anti-<huCDH19> 22G10.1 (1-234)(Q97E, S98P) VL]::huKLC
EIVMTQSPVTLSLSLGERATLSCRASQSISSNLAWFQQKPGQAPRLLIYGAFTRATGIPARVSGSGSGTEF
TLTISSLEPEDFAVYYCQQYNYWPLTFGGGTKVEIKRTVAAPSVFIFPPSDEQLKSGTASVVCLLNNFYP
REAKVQWKVDNALQSGNSQESVTEQDSKDSTYSLSSTLTLSKADYEKHKVYACEVTHQGLSSPVTKSF
NRGEC
SEQ ID NO: 860
14068_LC [hu anti-<huCDH19> 22G10.1 (1-234)(V78F, Q97E, S98P) VL]::huKLC
EIVMTQSPVTLSLSLGERATLSCRASQSISSNLAWFQQKPGQAPRLLIYGAFTRATGIPARFSGSGSGTEF
TLTISSLEPEDFAVYYCQQYNYWPLTFGGGTKVEIKRTVAAPSVFIFPPSDEQLKSGTASVVCLLNNFYP
REAKVQWKVDNALQSGNSQESVTEQDSKDSTYSLSSTLTLSKADYEKHKVYACEVTHQGLSSPVTKSF
NRGEC
SEQ ID NO: 861
14069_LC [hu anti-<huCDH19> 22G10.1 (1-234)(V78F, Q97E, S98P) VL]::huKLC
EIVMTQSPVTLSLSLGERATLSCRASQSISSNLAWFQQKPGQAPRLLIYGAFTRATGIPARFSGSGSGTEF
TLTISSLEPEDFAVYYCQQYNYWPLTFGGGTKVEIKRTVAAPSVFIFPPSDEQLKSGTASVVCLLNNFYP
REAKVQWKVDNALQSGNSQESVTEQDSKDSTYSLSSTLTLSKADYEKHKVYACEVTHQGLSSPVTKSF
NRGEC
SEQ ID NO: 862
14070_LC [hu anti-<huCDH19> 22G10.1 VL]::huKLC
EIVMTQSPVTLSLSLGERATLSCRASQSISSNLAWFQQKPGQAPRLLIYGAFTRATGIPARVSGSGSGTEF
TLTISSLQSEDFAVYYCQQYNYWPLTFGGGTKVEIKRTVAAPSVFIFPPSDEQLKSGTASVVCLLNNFYP
REAKVQWKVDNALQSGNSQESVTEQDSKDSTYSLSSTLTLSKADYEKHKVYACEVTHQGLSSPVTKSF
NRGEC
SEQ ID NO: 863
14071_LC [hu anti-<huCDH19> 16A4.1 (1-235)(G141Q) VL]::huKLC
EIVLTQSPGTLSLSPGERATLSCRASQSVSSSYLAWYQQKPGQAPRLLIYGTSSRATGIPDRFSGSGSGTD
FTLTISRLEPEDFAVYYCQQYGSSPFTFGQGTKVEIKRTVAAPSVFIFPPSDEQLKSGTASVVCLLNNFYP
REAKVQWKVDNALQSGNSQESVTEQDSKDSTYSLSSTLTLSKADYEKHKVYACEVTHQGLSSPVTKSF
NRGEC
SEQ ID NO: 864
14072_LC [hu anti-<huCDH19> 19B5.1 (1-235)(K45Q, S102A) VL]::huLLC-C2
QSALTQPPSTTGTPGQRVTISCSGSRSNIGSNFVNWYQQLPGTAPKVLIYTNNQRPSGVPDRFSGSKSGTS
ASLAISGLQSEDEADYYCATWDDSMNGWVFGGGTKLTVLGQPKAAPSVTLFPPSSEELQANKATLVCL
ISDFYPGAVTVAWKADSSPVKAGVETTTPSKQSNNKYAASSYLSLTPEQWKSHRSYSCQVTHEGSTVE
KTVAPTECS
SEQ ID NO: 865
14073_LC [hu anti-<huCDH19> 19B5.1 (1-235)(K45Q, S102A) VL]::huLLC-C2
QSALTQPPSTTGTPGQRVTISCSGSRSNIGSNFVNWYQQLPGTAPKVLIYTNNQRPSGVPDRFSGSKSGTS
ASLAISGLQSEDEADYYCATWDDSMNGWVFGGGTKLTVLGQPKAAPSVTLFPPSSEELQANKATLVCL
ISDFYPGAVTVAWKADSSPVKAGVETTTPSKQSNNKYAASSYLSLTPEQWKSHRSYSCQVTHEGSTVE
KTVAPTECS
SEQ ID NO: 866
14074_LC [hu anti-<huCDH19> 19B5.1 (1-235)(T11V, K45Q, S102A) VL]::huLLC-C2
QSALTQPPSVTGTPGQRVTISCSGSRSNIGSNFVNWYQQLPGTAPKVLIYTNNQRPSGVPDRFSGSKSGT
SASLAISGLQSEDEADYYCATWDDSMNGWVFGGGTKLTVLGQPKAAPSVTLFPPSSEELQANKATLVC
LISDFYPGAVTVAWKADSSPVKAGVETTTPSKQSNNKYAASSYLSLTPEQWKSHRSYSCQVTHEGSTV
EKTVAPTECS
SEQ ID NO: 867
14075_LC [hu anti-<huCDH19> 19B5.1 (1-235)(T11V, K45Q, S102A, D111E, N135Q)
VL]::huLLC-C2
QSALTQPPSVTGTPGQRVTISCSGSRSNIGSNFVNWYQQLPGTAPKVLIYTNNQRPSGVPDRFSGSKSGT
SASLAISGLQSEDEADYYCATWDESMQGWVFGGGTKLTVLGQPKAAPSVTLFPPSSEELQANKATLVC
LISDFYPGAVTVAWKADSSPVKAGVETTTPSKQSNNKYAASSYLSLTPEQWKSHRSYSCQVTHEGSTV
EKTVAPTECS
SEQ ID NO: 868
14076_LC [hu anti-<huCDH19> 19B5.1 (1-235)(T11V, K45Q, S102A, W109Y, D111E,
N135Q) VL]::huLLC-C2
QSALTQPPSVTGTPGQRVTISCSGSRSNIGSNFVNWYQQLPGTAPKVLIYTNNQRPSGVPDRFSGSKSGT
SASLAISGLQSEDEADYYCATYDESMQGWVFGGGTKLTVLGQPKAAPSVTLFPPSSEELQANKATLVC
LISDFYPGAVTVAWKADSSPVKAGVETTTPSKQSNNKYAASSYLSLTPEQWKSHRSYSCQVTHEGSTV
EKTVAPTECS
SEQ ID NO: 869
14077_LC [hu anti-<huCDH19> 23A10.3 (1-231)(C42S) VL]::huLLC-C2
SYELTQPPSVSVSPGQTASITCSGDRLGEKYVSWYQQKPGQSPILVIYQDNKWPSGIPERFSGSNSGNTA
TLTISGTQAMDEADYYCQAWDSSTVVFGGGTKLTVLGQPKAAPSVTLFPPSSEELQANKATLVCLISDF
YPGAVTVAWKADSSPVKAGVETTTPSKQSNNKYAASSYLSLTPEQWKSHRSYSCQVTHEGSTVEKTV
APTECS
SEQ ID NO: 870
14078_LC [hu anti-<huCDH19> 23A10.3 (1-231)(C42S) VL]::huLLC-C2
SYELTQPPSVSVSPGQTASITCSGDRLGEKYVSWYQQKPGQSPILVIYQDNKWPSGIPERFSGSNSGNTA
TLTISGTQAMDEADYYCQAWDSSTVVFGGGTKLTVLGQPKAAPSVTLFPPSSEELQANKATLVCLISDF
YPGAVTVAWKADSSPVKAGVETTTPSKQSNNKYAASSYLSLTPEQWKSHRSYSCQVTHEGSTVEKTV
APTECS
SEQ ID NO: 871
14079_LC [hu anti-<huCDH19> 23A10.3 (1-231)(C42S, D110E) VL]::huLLC-C2
SYELTQPPSVSVSPGQTASITCSGDRLGEKYVSWYQQKPGQSPILVIYQDNKWPSGIPERFSGSNSGNTA
TLTISGTQAMDEADYYCQAWESSTVVFGGGTKLTVLGQPKAAPSVTLFPPSSEELQANKATLVCLISDF
YPGAVTVAWKADSSPVKAGVETTTPSKQSNNKYAASSYLSLTPEQWKSHRSYSCQVTHEGSTVEKTV
APTECS
SEQ ID NO: 872
14080_LC [hu anti-<huCDH19> 23A10.3 (1-231)(C42Y) VL]::huLLC-C2
SYELTQPPSVSVSPGQTASITCSGDRLGEKYVYWYQQKPGQSPILVIYQDNKWPSGIPERFSGSNSGNTA
TLTISGTQAMDEADYYCQAWDSSTVVFGGGTKLTVLGQPKAAPSVTLFPPSSEELQANKATLVCLISDF
YPGAVTVAWKADSSPVKAGVETTTPSKQSNNKYAASSYLSLTPEQWKSHRSYSCQVTHEGSTVEKTV
APTECS
SEQ ID NO: 873
14081_LC [hu anti-<huCDH19> 25G10.1 (1-235)(H105Y) VL]::huKLC
EIVLTQSPGTLSLSPGERATLSCRASQSVSSSYLAWYQQKPGQAPRLLIFGASSRATGIPDRFSGSGSGTD
FTLTISRLEPEDFAVYYCQQYGNSPLTFGGGTKVEIKRTVAAPSVFIFPPSDEQLKSGTASVVCLLNNFYP
REAKVQWKVDNALQSGNSQESVTEQDSKDSTYSLSSTLTLSKADYEKHKVYACEVTHQGLSSPVTKSF
NRGEC
SEQ ID NO: 874
14082_LC [hu anti-<huCDH19> 25G10.1 (1-235)(H105Y) VL]::huKLC
EIVLTQSPGTLSLSPGERATLSCRASQSVSSSYLAWYQQKPGQAPRLLIFGASSRATGIPDRFSGSGSGTD
FTLTISRLEPEDFAVYYCQQYGNSPLTFGGGTKVEIKRTVAAPSVFIFPPSDEQLKSGTASVVCLLNNFYP
REAKVQWKVDNALQSGNSQESVTEQDSKDSTYSLSSTLTLSKADYEKHKVYACEVTHQGLSSPVTKSF
NRGEC
SEQ ID NO: 875
14083_LC [hu anti-<huCDH19> 26D1.1 (1-235)(S7P) VL]::huLLC-C2
HSVLTQPPSASGTPGQRVTISCSGSRSNIGSNFVNWYQQLPGTAPKLLIYTNNQRPSGVPDRFSGSKSGTS
ASLAISGLQSEDEADYYCAVWDDSLNGWVFGGGTKLTVLGQPKAAPSVTLFPPSSEELQANKATLVCLI
SDFYPGAVTVAWKADSSPVKAGVETTTPSKQSNNKYAASSYLSLTPEQWKSHRSYSCQVTHEGSTVEK
TVAPTECS
SEQ ID NO: 876
14084_LC [hu anti-<huCDH19> 26D1.1 (1-235)(H1Q, S7P) VL]::huLLC-C2
QSVLTQPPSASGTPGQRVTISCSGSRSNIGSNFVNWYQQLPGTAPKLLIYTNNQRPSGVPDRFSGSKSGTS
ASLAISGLQSEDEADYYCAVWDDSLNGWVFGGGTKLTVLGQPKAAPSVTLFPPSSEELQANKATLVCLI
SDFYPGAVTVAWKADSSPVKAGVETTTPSKQSNNKYAASSYLSLTPEQWKSHRSYSCQVTHEGSTVEK
TVAPTECS
SEQ ID NO: 877
14085_LC [hu anti-<huCDH19> 26D1.1 (1-235)(H1Q, S7P, W109Y) VL]::huLLC-C2
QSVLTQPPSASGTPGQRVTISCSGSRSNIGSNFVNWYQQLPGTAPKLLIYTNNQRPSGVPDRFSGSKSGTS
ASLAISGLQSEDEADYYCAVYDDSLNGWVFGGGTKLTVLGQPKAAPSVTLFPPSSEELQANKATLVCLI
SDFYPGAVTVAWKADSSPVKAGVETTTPSKQSNNKYAASSYLSLTPEQWKSHRSYSCQVTHEGSTVEK
TVAPTECS
SEQ ID NO: 878
14086_LC [hu anti-<huCDH19> 26D1.1 (1-235)(H1Q, S7P, W109Y, D111E, N135Q)
VL]::huLLC-C2
QSVLTQPPSASGTPGQRVTISCSGSRSNIGSNFVNWYQQLPGTAPKLLIYTNNQRPSGVPDRFSGSKSGTS
ASLAISGLQSEDEADYYCAVYDESLQGWVFGGGTKLTVLGQPKAAPSVTLFPPSSEELQANKATLVCLI
SDFYPGAVTVAWKADSSPVKAGVETTTPSKQSNNKYAASSYLSLTPEQWKSHRSYSCQVTHEGSTVEK
TVAPTECS
SEQ ID NO: 879
14087_LC [hu anti-<huCDH19> 26D1.1 (1-235)(H1Q, S7P, W109Y, D111E, N135Q)
VL]::huLLC-C2
QSVLTQPPSASGTPGQRVTISCSGSRSNIGSNFVNWYQQLPGTAPKLLIYTNNQRPSGVPDRFSGSKSGTS
ASLAISGLQSEDEADYYCAVYDESLQGWVFGGGTKLTVLGQPKAAPSVTLFPPSSEELQANKATLVCLI
SDFYPGAVTVAWKADSSPVKAGVETTTPSKQSNNKYAASSYLSLTPEQWKSHRSYSCQVTHEGSTVEK
TVAPTECS
SEQ ID NO: 880
14088_LC [hu anti-<huCDH19> 26D1.1 (1-235)(H1Q, S7P) VL]::huLLC-C2
QSVLTQPPSASGTPGQRVTISCSGSRSNIGSNFVNWYQQLPGTAPKLLIYTNNQRPSGVPDRFSGSKSGTS
ASLAISGLQSEDEADYYCAVWDDSLNGWVFGGGTKLTVLGQPKAAPSVTLFPPSSEELQANKATLVCLI
SDFYPGAVTVAWKADSSPVKAGVETTTPSKQSNNKYAASSYLSLTPEQWKSHRSYSCQVTHEGSTVEK
TVAPTECS
SEQ ID NO: 881
14089_LC [hu anti-<huCDH19> 26F12.1 (1-235)(S7P) VL]::huLLC-C2
QSVLTQPPSASGTPGQKVTISCSGSRSNIGSNFVNWYQQLPGTAPKLLIYTNYQRPSGVPDRFSGSKSGTS
ASLAISGLQSEDEADYYCAVWDDSLNGWVFGGGTKLTVLGQPKAAPSVTLFPPSSEELQANKATLVCLI
SDFYPGAVTVAWKADSSPVKAGVETTTPSKQSNNKYAASSYLSLTPEQWKSHRSYSCQVTHEGSTVEK
TVAPTECS
SEQ ID NO: 882
14090_LC [hu anti-<huCDH19> 26F12.1 (1-235)(S7P, D111E) VL]::huLLC-C2
QSVLTQPPSASGTPGQKVTISCSGSRSNIGSNFVNWYQQLPGTAPKLLIYTNYQRPSGVPDRFSGSKSGTS
ASLAISGLQSEDEADYYCAVWDESLNGWVFGGGTKLTVLGQPKAAPSVTLFPPSSEELQANKATLVCLI
SDFYPGAVTVAWKADSSPVKAGVETTTPSKQSNNKYAASSYLSLTPEQWKSHRSYSCQVTHEGSTVEK
TVAPTECS
SEQ ID NO: 883
14091_LC [hu anti-<huCDH19> 26F12.1 (1-235)(S7P, D111E) VL]::huLLC-C2
QSVLTQPPSASGTPGQKVTISCSGSRSNIGSNFVNWYQQLPGTAPKLLIYTNYQRPSGVPDRFSGSKSGTS
ASLAISGLQSEDEADYYCAVWDESLNGWVFGGGTKLTVLGQPKAAPSVTLFPPSSEELQANKATLVCLI
SDFYPGAVTVAWKADSSPVKAGVETTTPSKQSNNKYAASSYLSLTPEQWKSHRSYSCQVTHEGSTVEK
TVAPTECS
SEQ ID NO: 884
14092_LC [hu anti-<huCDH19> 26F12.1 (1-235)(S7P, W109Y, D111E, N135Q) VL]::
huLLC-C2
QSVLTQPPSASGTPGQKVTISCSGSRSNIGSNFVNWYQQLPGTAPKLLIYTNYQRPSGVPDRFSGSKSGTS
ASLAISGLQSEDEADYYCAVYDESLQGWVFGGGTKLTVLGQPKAAPSVTLFPPSSEELQANKATLVCLI
SDFYPGAVTVAWKADSSPVKAGVETTTPSKQSNNKYAASSYLSLTPEQWKSHRSYSCQVTHEGSTVEK
TVAPTECS
SEQ ID NO: 885
14093_LC [hu anti-<huCDH19> 25F8.1 (1-235)(K45Q) VL]::huLLC-C2
QSALTQPPSATGTPGQRVTISCSGSSSNIGRNFVNWYQQLPGTAPKVLIYTNNQRPSGVPDRFSGSKSGT
SASLAISGLQSEDESDYYCAAWDDSLNGWVFGGGTKLTVLGQPKAAPSVTLFPPSSEELQANKATLVC
LISDFYPGAVTVAWKADSSPVKAGVETTTPSKQSNNKYAASSYLSLTPEQWKSHRSYSCQVTHEGSTV
EKTVAPTECS
SEQ ID NO: 886
14094_LC [hu anti-<huCDH19> 25F8.1 (1-235)(K45Q, S102A) VL]::huLLC-C2
QSALTQPPSATGTPGQRVTISCSGSSSNIGRNFVNWYQQLPGTAPKVLIYTNNQRPSGVPDRFSGSKSGT
SASLAISGLQSEDEADYYCAAWDDSLNGWVFGGGTKLTVLGQPKAAPSVTLFPPSSEELQANKATLVC
LISDFYPGAVTVAWKADSSPVKAGVETTTPSKQSNNKYAASSYLSLTPEQWKSHRSYSCQVTHEGSTV
EKTVAPTECS
SEQ ID NO: 887
14095_LC [hu anti-<huCDH19> 25F8.1 (1-235)(K45Q, S102A) VL]::huLLC-C2
QSALTQPPSATGTPGQRVTISCSGSSSNIGRNFVNWYQQLPGTAPKVLIYTNNQRPSGVPDRFSGSKSGT
SASLAISGLQSEDEADYYCAAWDDSLNGWVFGGGTKLTVLGQPKAAPSVTLFPPSSEELQANKATLVC
LISDFYPGAVTVAWKADSSPVKAGVETTTPSKQSNNKYAASSYLSLTPEQWKSHRSYSCQVTHEGSTV
EKTVAPTECS
SEQ ID NO: 888
14096_LC [hu anti-<huCDH19> 25F8.1 (1-235)(K45Q, S102A, D111E) VL]::huLLC-C2
QSALTQPPSATGTPGQRVTISCSGSSSNIGRNFVNWYQQLPGTAPKVLIYTNNQRPSGVPDRFSGSKSGT
SASLAISGLQSEDEADYYCAAWDESLNGWVFGGGTKLTVLGQPKAAPSVTLFPPSSEELQANKATLVC
LISDFYPGAVTVAWKADSSPVKAGVETTTPSKQSNNKYAASSYLSLTPEQWKSHRSYSCQVTHEGSTV
EKTVAPTECS
SEQ ID NO: 889
14097_LC [hu anti-<huCDH19> 25F8.1 (1-235)(K45Q, S102A, D111E, N135Q) VL]::
huLLC-C2
QSALTQPPSATGTPGQRVTISCSGSSSNIGRNFVNWYQQLPGTAPKVLIYTNNQRPSGVPDRFSGSKSGT
SASLAISGLQSEDEADYYCAAWDESLQGWVFGGGTKLTVLGQPKAAPSVTLFPPSSEELQANKATLVC
LISDFYPGAVTVAWKADSSPVKAGVETTTPSKQSNNKYAASSYLSLTPEQWKSHRSYSCQVTHEGSTV
EKTVAPTECS
SEQ ID NO: 890
14098_LC [hu anti-<huCDH19> 22D1.1 (1-235)(K45Q, S102A) VL]::huLLC-C2
QSALTQPPSATGTPGQRVTISCSGSSSNIGSNFVNWYQQLPGTAPKVLIYTNNQRPSGVPDRFSGSKSGTS
ASLAISGLQSEDEADYYCATWDDSMNGWVFGGGTKLTVLGQPKAAPSVTLFPPSSEELQANKATLVCL
ISDFYPGAVTVAWKADSSPVKAGVETTTPSKQSNNKYAASSYLSLTPEQWKSHRSYSCQVTHEGSTVE
KTVAPTECS
SEQ ID NO: 891
14099_LC [hu anti-<huCDH19> 22D1.1 (1-235)(K45Q, S102A, D111E, N135Q) VL]::
huLLC-C2
QSALTQPPSATGTPGQRVTISCSGSSSNIGSNFVNWYQQLPGTAPKVLIYTNNQRPSGVPDRFSGSKSGTS
ASLAISGLQSEDEADYYCATWDESMQGWVFGGGTKLTVLGQPKAAPSVTLFPPSSEELQANKATLVCL
ISDFYPGAVTVAWKADSSPVKAGVETTTPSKQSNNKYAASSYLSLTPEQWKSHRSYSCQVTHEGSTVE
KTVAPTECS
SEQ ID NO: 892
14100_LC [hu anti-<huCDH19> 22D1.1 (1-235)(K45Q, S102A, W109Y, D111E, N135Q)
VL]::huLLC-C2
QSALTQPPSATGTPGQRVTISCSGSSSNIGSNFVNWYQQLPGTAPKVLIYTNNQRPSGVPDRFSGSKSGTS
ASLAISGLQSEDEADYYCATYDESMQGWVFGGGTKLTVLGQPKAAPSVTLFPPSSEELQANKATLVCLI
SDFYPGAVTVAWKADSSPVKAGVETTTPSKQSNNKYAASSYLSLTPEQWKSHRSYSCQVTHEGSTVEK
TVAPTECS
SEQ ID NO: 893
14101_LC [hu anti-<huCDH19> 22D1.1 (1-235)(K45Q, S102A, W109Y) VL]::huLLC-C2
QSALTQPPSATGTPGQRVTISCSGSSSNIGSNFVNWYQQLPGTAPKVLIYTNNQRPSGVPDRFSGSKSGTS
ASLAISGLQSEDEADYYCATYDDSMNGWVFGGGTKLTVLGQPKAAPSVTLFPPSSEELQANKATLVCLI
SDFYPGAVTVAWKADSSPVKAGVETTTPSKQSNNKYAASSYLSLTPEQWKSHRSYSCQVTHEGSTVEK
TVAPTECS
SEQ ID NO: 894
14102_LC [hu anti-<huCDH19> 22D1.1 (1-235)(K45Q, S102A) VL]::huLLC-C2
QSALTQPPSATGTPGQRVTISCSGSSSNIGSNFVNWYQQLPGTAPKVLIYTNNQRPSGVPDRFSGSKSGTS
ASLAISGLQSEDEADYYCATWDDSMNGWVFGGGTKLTVLGQPKAAPSVTLFPPSSEELQANKATLVCL
ISDFYPGAVTVAWKADSSPVKAGVETTTPSKQSNNKYAASSYLSLTPEQWKSHRSYSCQVTHEGSTVE
KTVAPTECS
SEQ ID NO: 895
13591_LC [hu anti-<huCDH19> 4F7 VL]::huLLC-C1
QSVLTQPPSVSGAPGQRVTISCTGSSSNIGTGYDVHWYQQLPGTAPKLLIHGNSNRPSGVPDRFSGSKSG
TSASLAITGLQAEDEADYYCQSYDSSLSGWVFGGGTRLTVLGQPKANPTVTLFPPSSEELQANKATLVC
LISDFYPGAVTVAWKADGSPVKAGVETTKPSKQSNNKYAASSYLSLTPEQWKSHRSYSCQVTHEGSTV
EKTVAPTECS
SEQ ID NO: 896
14301_LC [hu anti-<huCDH19> 2G6 (1-234)(D110E) VL]::huLLC-C1
SYELTQPPSVSVSPGQTASITCSGDRLGEKYTCWYQQRPGQSPLLVIYQDTKRPSGIPERFSGSNSGNTAT
LTISGTQAMDEADYYCQAWESSTVVFGGGTKLTVLGQPKANPTVTLFPPSSEELQANKATLVCLISDFY
PGAVTVAWKADGSPVKAGVETTKPSKQSNNKYAASSYLSLTPEQWKSHRSYSCQVTHEGSTVEKTVA
PTECS
SEQ ID NO: 897
14302_LC [hu anti-<huCDH19> 2G6 (1-234)(C42S, D110E) VL]::huLLC-C1
SYELTQPPSVSVSPGQTASITCSGDRLGEKYTSWYQQRPGQSPLLVIYQDTKRPSGIPERFSGSNSGNTAT
LTISGTQAMDEADYYCQAWESSTVVFGGGTKLTVLGQPKANPTVTLFPPSSEELQANKATLVCLISDFY
PGAVTVAWKADGSPVKAGVETTKPSKQSNNKYAASSYLSLTPEQWKSHRSYSCQVTHEGSTVEKTVA
PTECS
SEQ ID NO: 898
14303_LC [hu anti-<huCDH19> 2G6 (1-234)(C42S, D110E) VL]::huLLC-C1
SYELTQPPSVSVSPGQTASITCSGDRLGEKYTSWYQQRPGQSPLLVIYQDTKRPSGIPERFSGSNSGNTAT
LTISGTQAMDEADYYCQAWESSTVVFGGGTKLTVLGQPKANPTVTLFPPSSEELQANKATLVCLISDFY
PGAVTVAWKADGSPVKAGVETTKPSKQSNNKYAASSYLSLTPEQWKSHRSYSCQVTHEGSTVEKTVA
PTECS
SEQ ID NO: 899
14304_LC [hu anti-<huCDH19> 23A10.3 (1-231)(C42S) VL]::huLLC-C2
SYELTQPPSVSVSPGQTASITCSGDRLGEKYVSWYQQKPGQSPILVIYQDNKWPSGIPERFSGSNSGNTA
TLTISGTQAMDEADYYCQAWDSSTVVFGGGTKLTVLGQPKAAPSVTLFPPSSEELQANKATLVCLISDF
YPGAVTVAWKADSSPVKAGVETTTPSKQSNNKYAASSYLSLTPEQWKSHRSYSCQVTHEGSTVEKTV
APTECS
SEQ ID NO: 900

TABLE IVa
HEAVY CHAIN CDRs

| Ab | Type | CDR 1 | CDR 2 | CDR 3 |
|---|---|---|---|---|
| 14039 | AA | SYGMH | FIWYEGSNKYYAESVKD | RAGIIGTIGYYYGMDV |
| 14303 | | SEQ ID NO: 28 | SEQ ID NO: 901 | SEQ ID NO: 30 |
| 14027 | AA | SSGYYWS | YIYYTGSAYYNPSLKS | EGSSGWYFQY |
| | | SEQ ID NO: 46 | SEQ ID NO: 47 | SEQ ID NO: 902 |
| 14028 | AA | SSGYYWS | YIYYTGSAYYNPSLKS | EGSSGYYFQY |
| | | SEQ ID NO: 46 | SEQ ID NO: 47 | SEQ ID NO: 903 |
| 14059 | AA | GYYWS | YFSYSGSTNYNPSLKS | NYAFHFDF |
| | | SEQ ID NO: 52 | SEQ ID NO: 53 | SEQ ID NO: 904 |
| 14052 | AA | SYDMH | VISYEGTNEYYAESVKG | ERYFDYSFDY |
| | | SEQ ID NO: 58 | SEQ ID NO: 905 | SEQ ID NO: 906 |
| 14055 | AA | SYDMH | VISYEGTNEYYAESVKG | ERYFDWSFDY |
| | | SEQ ID NO: 58 | SEQ ID NO: 905 | SEQ ID NO: 60 |
| 14033 | AA | SYDMD | VIWYEGSNKYYAESVRG | ETGEGWYFDL |
| | | SEQ ID NO: 70 | SEQ ID NO: 907 | SEQ ID NO: 72 |
| 14034 | AA | SYDMD | VIWYEGSNKYYAESVRG | ETGEGYYFDL |
| | | SEQ ID NO: 70 | SEQ ID NO: 907 | SEQ ID NO: 908 |
| 14051 | AA | SYSWS | YIYYSGSTNYNPSLKS | NYAFHFDY |
| | | SEQ ID NO: 82 | SEQ ID NO: 83 | SEQ ID NO: 909 |
| 14046 | AA | SYYWS | YIYYIGSTNYNPSLKS | ESRYRSGWYDAFDI |
| 14048 | | SEQ ID NO: 94 | SEQ ID NO: 95 | SEQ ID NO: 910 |
| 14047 | AA | SYYWS | YIYYIGSTNYNPSLKS | ESRYRSGYYDAFDI |
| | | SEQ ID NO: 94 | SEQ ID NO: 95 | SEQ ID NO: 911 |
| 14042 | AA | GYYWS | YIYYIGSTNYNPSLKS | EGSSGWYRWFDP |
| | | SEQ ID NO: 100 | SEQ ID NO: 101 | SEQ ID NO: 912 |
| 14043 | AA | GYYWS | YIYYIGSTNYNPSLKS | DGSSGYYRYFDP |
| | | SEQ ID NO: 100 | SEQ ID NO: 101 | SEQ ID NO: 913 |
| 14069 | AA | SYAMN | TISGGGANTYYAESVKG | GGMGGYYYGMDV |
| | | SEQ ID NO: 118 | SEQ ID NO: 914 | SEQ ID NO: 120 |
| 14062 | AA | SYFIH | IINPISVSTSYAQKFQG | GGIQLYLHFDY |
| 14063 | | SEQ ID NO: 124 | SEQ ID NO: 125 | SEQ ID NO: 915 |
| 14064 | | | | |
| 14100 | AA | SYFIH | IINPISVSTSYAQKFQG | GGIQLYLHLDY |
| 14101 | | SEQ ID NO: 130 | SEQ ID NO: 131 | SEQ ID NO: 916 |
| 14097 | AA | SYYIH | IINPSGGSTRYAQKFQG | GGIQLYLHFDY |
| | | SEQ ID NO: 136 | SEQ ID NO: 137 | SEQ ID NO: 917 |
| 14091 | AA | NYYMS | IINPSGGDSTYAQKFQG | GGIQLYLHFDY |
| 14092 | | SEQ ID NO: 142 | SEQ ID NO: 143 | SEQ ID NO: 918 |
| 14087 | AA | SYYMS | IIHPSGGDTTYAQKFQG | GGIKLYLHFDY |
| | | SEQ ID NO: 148 | SEQ ID NO: 149 | SEQ ID NO: 919 |
| 14082 | AA | GYYWS | YIYYIGSTNYNPSLKS | EGSSGYYRYFDP |
| | | SEQ ID NO: 154 | SEQ ID NO: 155 | SEQ ID NO: 920 |
| 14079 | AA | RYGIH | VIWYEGSNKYYAESVKG | RAGIPGTTGYYYGMDV |
| | | SEQ ID NO: 160 | SEQ ID NO: 921 | SEQ ID NO: 162 |
| 14073 | AA | SYFIH | IINPISVSTSYAQKFQG | GGIQLYLHLDY |
| | | SEQ ID NO: 1 | SEQ ID NO: 2 | SEQ ID NO: 3 |
| 14076 | AA | SYGMH | VIWYDGSNKYYADSVKG | RAGIIGTTGYYYGMDV |
| | | SEQ ID NO: 4 | SEQ ID NO: 5 | SEQ ID NO: 6 |

TABLE IVb
LIGHT CHAIN CDRs

| Ab | Type | CDR 1 | CDR 2 | CDR 3 |
|---|---|---|---|---|
| 14039 | AA | SGDRLGEKYTS | QDTKRPS | QAWESSTVV |
| 14302 | | SEQ ID NO: 922 | SEQ ID NO: 197 | SEQ ID NO: 923 |
| 14303 | | | | |
| 14301 | AA | SGDRLGEKYTC | QDTKRPS | QAWESSTVV |
| | | SEQ ID NO: 196 | SEQ ID NO: 197 | SEQ ID NO: 923 |
| 14022 | AA | RASRQISSSYLA | GPSSRAT | QQYGSSFT |
| 14024 | | SEQ ID NO: 924 | SEQ ID NO: 215 | SEQ ID NO: 216 |
| 14025 | | | | |
| 14026 | | | | |
| 14027 | | | | |
| 14028 | | | | |
| 14029 | AA | RASQSISSSYLA | GPSSRAT | QQYGSSFT |
| | | SEQ ID NO: 925 | SEQ ID NO: 215 | SEQ ID NO: 216 |
| 14058 | AA | TGSSSNIGTGYAVH | GNNNRPS | QSYESRLSGWV |
| 14059 | | SEQ ID NO: 220 | SEQ ID NO: 221 | SEQ ID NO: 926 |
| 14050 | AA | TGSSSNIGTGYDVH | GNSNRPS | QSYESSLSGWV |
| 14051 | | SEQ ID NO: 250 | SEQ ID NO: 251 | SEQ ID NO: 927 |
| 14063 | AA | SGSSSNIGSNFVN | TNNQRPS | ATWDESLQGWV |
| | | SEQ ID NO: 292 | SEQ ID NO: 293 | SEQ ID NO: 928 |
| 14064 | AA | SGSSSNIGSNFVN | TNNQRPS | ATYDDSLNGWV |
| | | SEQ ID NO: 292 | SEQ ID NO: 293 | SEQ ID NO: 929 |
| 14099 | AA | SGSSSNIGSNFVN | TNNQRPS | ATWDESMQGWV |
| | | SEQ ID NO: 298 | SEQ ID NO: 299 | SEQ ID NO: 930 |
| 14100 | AA | SGSSSNIGSNFVN | TNNQRPS | ATYDESMQGWV |
| | | SEQ ID NO: 298 | SEQ ID NO: 299 | SEQ ID NO: 931 |
| 14101 | AA | SGSSSNIGSNFVN | TNNQRPS | ATYDDSMNGWV |
| | | SEQ ID NO: 298 | SEQ ID NO: 299 | SEQ ID NO: 932 |
| 14096 | AA | SGSSSNIGRNEVN | TNNQRPS | AAWDESLNGWV |
| | | SEQ ID NO: 304 | SEQ ID NO: 305 | SEQ ID NO: 933 |
| 14097 | AA | SGSSSNIGRNEVN | TNNQRPS | AAWDESLQGWV |
| | | SEQ ID NO: 304 | SEQ ID NO: 305 | SEQ ID NO: 934 |
| 14090 | AA | SGSRSNIGSNEVN | TNYQRPS | AVWDESLNGWV |
| 14091 | | SEQ ID NO: 310 | SEQ ID NO: 311 | SEQ ID NO: 935 |
| 14092 | AA | SGSRSNIGSNEVN | TNYQRPS | AVYDESLQGWV |
| | | SEQ ID NO: 310 | SEQ ID NO: 311 | SEQ ID NO: 936 |
| 14085 | AA | SGSRSNIGSNEVN | TNNQRPS | AVYDDSLNGWV |
| | | SEQ ID NO: 316 | SEQ ID NO: 317 | SEQ ID NO: 937 |
| 14086 | AA | SGSRSNIGSNEVN | TNNQRPS | AVYDESLQGWV |
| 14087 | | SEQ ID NO: 316 | SEQ ID NO: 317 | SEQ ID NO: 938 |
| 14077 | AA | SGDRLGEKYVS | QDNKWPS | QAWDSSTVV |
| 14078 | | SEQ ID NO: 939 | SEQ ID NO: 329 | SEQ ID NO: 330 |
| 14304 | | | | |
| 14079 | AA | SGDRLGEKYVS | QDNKWPS | QAWESSTVV |
| | | SEQ ID NO: 939 | SEQ ID NO: 329 | SEQ ID NO: 940 |
| 14080 | AA | SGDRLGEKYVY | QDNKWPS | QAWDSSTVV |
| | | SEQ ID NO: 941 | SEQ ID NO: 329 | SEQ ID NO: 330 |
| 14075 | AA | SGSRSNIGSNEVN | TNNQRPS | ATWDESMQGWV |
| | | SEQ ID NO: 334 | SEQ ID NO: 335 | SEQ ID NO: 942 |
| 14076 | AA | SGSRSNIGSNEVN | TNNQRPS | ATYDESMQGWV |
| | | SEQ ID NO: 334 | SEQ ID NO: 335 | SEQ ID NO: 943 |

[0494] Human and Cynomologous Monkey Cadherin-19 Sequences

TABLE V

| SEQ | | | | |
|---|---|---|---|---|
| ID | | | | |
| NO. | DESIGNATION | SOURCE | TYPE | SEQUENCE |
| 944 | Human | Human | aa | MNCYLLLRFMLGIPLLWPCLGATENSQTKKVKQPVRSHLRVKR |
| | Cadherin-19 | | | GWVWNQFFVPEEMNTTSHHIGQLRSDLDNGNNSFQYKLLGAGA |
| | | | | GSTFIIDERTGDIYAIQKLDREERSLYILRAQVIDIATGRAVE |
| | | | | PESEEVIKVSDINDNEPKELDEPYEAIVPEMSPEGTLVIQVTA |
| | | | | SDADDPSSGNNARLLYSLLQGQPYFSVEPTTGVIRISSKMDRE |
| | | | | LQDEYWVIIQAKDMIGQPGALSGTTSVLIKLSDVNDNKPIFKE |
| | | | | SLYRLTVSESAPTGTSIGTIMAYDNDIGENAEMDYSIEEDDSQ |
| | | | | TEDIITNHETQEGIVILKKKVDFEHQNHYGIRAKVKNHHVPEQ |
| | | | | LMKYHTEASTTFIKIQVEDVDEPPLFLLPYYVFEVFEETPQGS |
| | | | | FVGVVSATDPDNRKSPIRYSITRSKVFNINDNGTITTSNSLDR |
| | | | | EISAWYNLSITATEKYNIEQISSIPLYVQVLNINDHAPEFSQY |
| | | | | YETYVCENAGSGQVIQTISAVDRDESIEEHHEYFNLSVEDTNN |
| | | | | SSETIIDNQDNTAVILTNRTGENLQEEPVFYISILIADNGIPS |
| | | | | LTSTNTLTIHVCDCGDSGSTQTCQYQELVLSMGFKTEVIIAIL |
| | | | | ICIMIIFGFIFLTLGLKQRRKQILFPEKSEDFRENIFQYDDEG |
| | | | | GGEEDTEAFDIAELRSSTIMRERKTRKTTSAEIRSLYRQSLQV |
| | | | | GPDSAIFRKFILEKLEEANTDPCAPPFDSLQTYAFEGTGSLAG |
| | | | | SLSSLESAVSDQDESYDYLNELGPRFKRLACMFGSAVQSNN |
| 945 | Human | Human | nt | atgaactgttatttactgctgcgttttatgttgggaattcctc |
| | Cadherin-19 | | | tcctatggccttgtcttggagcaacagaaaactctcaaacaaa |
| | | | | gaaagtcaagcagccagtgcgatctcatttgagagtgaagcgt |
| | | | | ggctgggtgtggaaccaattttttgtaccagaggaaatgaata |
| | | | | cgactagtcatcacatcggccagctaagatctgatttagacaa |
| | | | | tggaaacaattctttccagtacaagcttttgggagctggagct |
| | | | | ggaagtacttttatcattgatgaaagaacaggtgacatatatg |
| | | | | ccatacagaagcttgatagagaggagcgatccctctacatctt |
| | | | | aagagcccaggtaatagacatcgctactggaagggctgtggaa |
| | | | | cctgagtctgagtttgtcatcaaagtttcggatatcaatgaca |
| | | | | atgaaccaaaattcctagatgaaccttatgaggccattgtacc |
| | | | | agagatgtctccagaaggaacattagttatccaggtgacagca |
| | | | | agtgatgctgacgatccctcaagtggtaataatgctcgtctcc |
| | | | | tctacagcttacttcaaggccagccatatttttctgttgaacc |
| | | | | aacaacaggagtcataagaatatcttctaaaatggatagagaa |
| | | | | ctgcaagatgagtattgggtaatcattcaagccaaggacatga |
| | | | | ttggtcagccaggagcgttgtctggaacaacaagtgtattaat |
| | | | | taaactttcagatgttaatgacaataagcctatatttaaagaa |
| | | | | agtttataccgcttgactgtctctgaatctgcacccactggga |
| | | | | cttctataggaacaatcatggcatatgataatgacataggaga |
| | | | | gaatgcagaaatggattacagcattgaagaggatgattcgcaa |
| | | | | acatttgacattattactaatcatgaaactcaagaaggaatag |
| | | | | ttatattaaaaaagaaagtggattttgagcaccagaaccacta |
| | | | | cggtattagagcaaaagttaaaaaccatcatgttcctgagcag |
| | | | | ctcatgaagtaccacactgaggcttccaccactttcattaaga |
| | | | | tccaggtggaagatgttgatgagcctcctcttttcctccttcc |
| | | | | atattatgtatttgaagtttttgaagaaaccccacagggatca |
| | | | | tttgtaggcgtggtgtctgccacagacccagacaataggaaat |
| | | | | ctcctatcaggtattctattactaggagcaaagtgttcaatat |
| | | | | caatgataatggtacaatcactacaagtaactcactggatcgt |
| | | | | gaaatcagtgcttggtacaacctaagtattacagccacagaaa |
| | | | | aatacaatatagaacagatctcttcgatcccactgtatgtgca |
| | | | | agttcttaacatcaatgatcatgctcctgagttctctcaatac |
| | | | | tatgagacttatgtttgtgaaaatgcaggctctggtcaggtaa |
| | | | | ttcagactatcagtgcagtggatagagatgaatccatagaaga |
| | | | | gcaccatttttactttaatctatctgtagaagacactaacaat |
| | | | | tcaagttttacaatcatagataatcaagataacacagctgtca |
| | | | | ttttgactaatagaactggttttaaccttcaagaagaacctgt |
| | | | | cttctacatctccatcttaattgccgacaatggaatcccgtca |
| | | | | cttacaagtacaaacacccttaccatccatgtctgtgactgtg |
| | | | | gtgacagtgggagcacacagacctgccagtaccaggagcttgt |
| | | | | gctttccatgggattcaagacagaagtcatcattgctattctc |
| | | | | atttgcattatgatcatatttgggtttatttttttgactttgg |
| | | | | gtttaaaacaacggagaaaacagattctatttcctgagaaaag |
| | | | | tgaagatttcagagagaatatattccaatatgatgatgaaggg |
| | | | | ggtggagaagaagatacagaggcctttgatatagcagagctga |
| | | | | ggagtagtaccataatgcgggaacgcaagactcggaaaaccac |
| | | | | aagcgctgagatcaggagcctatacaggcagtctttgcaagtt |
| | | | | ggccccgacagtgccatattcaggaaattcattctggaaaagc |
| | | | | tcgaagaagctaatactgatccgtgtgcccctccttttgattc |
| | | | | cctccagacctacgcttttgagggaacagggtcattagctgga |
| | | | | tccctgagctccttagaatcagcagtctctgatcaggatgaaa |
| | | | | gctatgattaccttaatgagttgggacctcgctttaaaagatt |
| | | | | agcatgcatgtttggttctgcagtgcagtcaaataattag |
| 946 | Cyno | Macaca | aa | MNCYLLLPFMLGIPLLWPCLGATENSQTKKVQQPVGSHLRVKR |
| | Cadherin-19 | fascicularis | | GWVWNQFFVPEEMNTTSHHVGRLRSDLDNGNNSFQYKLLGAGA |
| | | | | GSTFIIDERTGDIYAIEKLDREERSLYILRAQVIDITTGRAVE |
| | | | | PESEEVIKVSDINDNEPKELDEPYEAIVPEMSPEGTLVIQVTA |
| | | | | SDADDPSSGNNARLLYSLLQGQPYFSVEPTTGVIRISSKMDRE |
| | | | | LQDEYWVIIQAKDMIGQPGALSGTTSVLIKLSDVNDNKPIFKE |
| | | | | SLYRLTVSESAPTGTSIGTIMAYDNDIGENAEMDYSIEEDDSQ |
| | | | | TEDIITNHETQEGIVILKKKVNFEHQNHYGIRAKVKNHHVDEQ |
| | | | | LMKYHTEASTTFIKIQVEDVDEPPLELLPYYIFEIFEETPQGS |
| | | | | FVGVVSATDPDNRKSPIRYSITRSKVFNIDDNGTITTTNSLDR |
| | | | | EISAWYNLSITATEKYNIEQISSIPVYVQVLNINDHAPEFSQY |
| | | | | YESYVCENAGSGQVIQTISAVDRDESIEEHHEYFNLSVEDTNS |
| | | | | SSETIIDNQDNTAVILTNRTGFNLQEEPIFYISILIADNGIPS |
| | | | | LTSTNTLTIHVCDCDDSGSTQTCQYQELMLSMGFKTEVITAIL |
| | | | | ICIMVIEGFIFLTLGLKQRRKQILFPEKSEDFRENIFRYDDEG |
| | | | | GGEEDTEAFDVAALRSSTIMRERKTRKTTSAEIRSLYRQSLQV |
| | | | | GPDSAIFRKFILEKLEEADTDPCAPPFDSLQTYAFEGTGSLAG |
| | | | | SLSSLESAVSDQDESYDYLNELGPRFKRLACMFGSAVQSNN |
| 947 | Cyno | Macaca | nt | ATGAATTGTTATTTACTGCTGCCTTTTATGTTGGGAATTCCTC |
| | Cadherin-19 | fascicularis | | TCCTATGGCCTTGTCTTGGAGCAACAGAAAACTCTCAAACAAA |
| | | | | GAAAGTCCAGCAGCCAGTAGGATCTCATCTGAGAGTGAAGCGT |
| | | | | GGCTGGGTGTGGAACCAATTTTTTGTACCAGAGGAAATGAATA |
| | | | | CGACTAGTCATCACGTTGGCCGGCTAAGATCTGATTTAGACAA |
| | | | | TGGAAACAATTCTTTCCAGTACAAGCTTTTGGGAGCTGGAGCT |
| | | | | GGAAGTACTTTTATCATTGATGAAAGAACAGGTGACATATATG |
| | | | | CCATAGAGAAGCTTGATAGAGAGGAGCGATCCCTCTACATCTT |
| | | | | AAGAGCCCAGGTAATAGACATCACTACTGGAAGGGCTGTGGAA |
| | | | | CCTGAGTCTGAGTTTGTCATCAAAGTTTCGGATATCAATGACA |
| | | | | ATGAACCAAAATTCCTAGATGAACCTTATGAGGCCATTGTACC |
| | | | | AGAGATGTCTCCAGAAGGAACATTAGTCATCCAGGTGACAGCA |
| | | | | AGTGATGCTGATGACCCTTCAAGTGGTAATAATGCTCGTCTCC |
| | | | | TCTACAGCTTATTACAAGGCCAGCCATATTTTTCTGTTGAACC |
| | | | | AACAACAGGAGTCATAAGAATATCTTCTAAAATGGATAGAGAA |
| | | | | CTGCAAGATGAGTATTGGGTAATCATTCAAGCCAAGGACATGA |
| | | | | TTGGTCAGCCAGGAGCGTTGTCTGGAACAACGAGTGTATTAAT |
| | | | | TAAACTTTCAGATGTTAATGACAATAAGCCTATATTTAAAGAA |
| | | | | AGTTTATACCGCCTGACGGTCTCTGAATCTGCACCCACTGGGA |
| | | | | CTTCTATAGGAACAATCATGGCATATGATAATGACATAGGAGA |
| | | | | GAATGCAGAAATGGATTACAGCATTGAAGAGGATGATTCACAG |
| | | | | ACATTTGACATTATTACTAATCATGAAACTCAAGAAGGAATAG |
| | | | | TTATATTAAAAAAGAAAGTGAATTTTGAGCACCAGAACCACTA |
| | | | | TGGTATTAGAGCAAAAGTTAAAAACCATCATGTTGATGAGCAG |
| | | | | CTCATGAAATACCACACTGAAGCTTCCACCACTTTCATTAAGA |
| | | | | TCCAGGTGGAAGATGTTGATGAGCCTCCTCTTTTCCTCCTTCC |
| | | | | GTATTACATATTTGAAATTTTTGAAGAAACCCCACAAGGATCA |
| | | | | TTTGTAGGCGTGGTGTCTGCCACAGACCCAGACAATAGGAAAT |
| | | | | CTCCTATCAGGTATTCTATTACTAGGAGCAAAGTGTTCAATAT |
| | | | | CGATGATAATGGTACAATCACTACAACTAACTCACTGGATCGG |
| | | | | GAAATCAGTGCTTGGTACAACCTAAGTATTACAGCCACAGAAA |
| | | | | AATACAATATAGAGCAGATCTCTTCGATCCCAGTGTATGTGCA |
| | | | | AGTTCTTAATATCAATGATCATGCTCCTGAGTTCTCTCAATAC |
| | | | | TATGAGAGTTATGTTTGTGAAAATGCAGGCTCTGGTCAGGTAA |
| | | | | TTCAGACTATCAGTGCAGTGGATAGAGATGAATCCATAGAAGA |
| | | | | GCACCATTTTTACTTTAATCTATCTGTAGAAGACACTAACTCT |
| | | | | TCAAGTTTTACAATCATAGACAATCAAGATAACACAGCTGTCA |
| | | | | TTTTGACTAATAGAACTGGTTTTAACCTTCAAGAAGAGCCCAT |
| | | | | CTTCTACATCTCCATCTTAATTGCCGACAATGGAATCCCGTCA |
| | | | | CTTACAAGTACAAACACCCTTACCATCCATGTCTGTGACTGTG |
| | | | | ATGACAGTGGGAGCACACAGACCTGCCAGTACCAGGAGCTTAT |
| | | | | GCTTTCCATGGGATTCAAGACAGAAGTCATCATTGCTATTCTC |
| | | | | ATTTGCATTATGGTAATATTTGGGTTTATTTTTTTGACTTTGG |
| | | | | GTTTAAAACAACGGAGAAAACAGATTCTATTTCCTGAGAAAAG |
| | | | | TGAAGATTTCAGAGAGAATATATTCCGATATGATGACGAAGGG |
| | | | | GGTGGAGAAGAAGATACAGAGGCCTTTGACGTAGCAGCGCTGA |
| | | | | GGAGTAGCACCATAATGCGGGAACGCAAGACTCGGAAAACCAC |
| | | | | CAGCGCTGAGATCAGGAGCCTATACAGGCAGTCTTTGCAAGTT |
| | | | | GGCCCCGACAGTGCCATATTCAGGAAGTTCATCCTGGAAAAGC |
| | | | | TCGAAGAAGCTGATACTGATCCGTGTGCCCCTCCTTTTGATTC |
| | | | | CCTCCAGACCTACGCTTTTGAGGGAACAGGGTCATTAGCTGGA |
| | | | | TCCCTGAGCTCCTTAGAATCAGCTGTCTCTGATCAGGATGAAA |
| | | | | GCTATGATTACCTTAACGAGTTGGGACCTCGCTTTAAAAGATT |
| | | | | AGCATGCATGTTTGGTTCTGCAGTGCAGTCAAATAATTAG |
| 948 | secreted | Human | aa | MNCYLLLRFMLGIPLLWPCLGATENSQTKKVKQPVRSHLRVKR |
| | Cadherin-19 | | | GWVWNQFFVPEEMNTTSHHIGQLRSDLDNGNNSFQYKLLGAGA |
| | eto-domain | | | GSTFIIDERTGDIYAIQKLDREERSLYILRAQVIDIATGRAVE |
| | (amino acids | | | PESEFVIKVSDINDNEPKFLDEPYEAIVPEHSPEGTLVIQVTA |
| | 1-596) | | | SDADDPSSGNNARLLYSLLQGQPYFSVEPTTGVIRISSKMDRE |
| | | | | LQDEYWVIIQAKDMIGQPGALSGTTSVLIKLSDVNDNKPIFKE |
| | | | | SLYRLTVSESAPTGTSIGTIMAYDNDIGENAEMDYSIEEDDSQ |
| | | | | TFDIITNHETQEGIVILKKKVDFEHQNHYGIRAKVKNHHVPEQ |
| | | | | LMKYHTEASTTFIKIQVEDVDEPPLFLLPYYVFEVFEETPQGS |
| | | | | FVGVVSATDPDNRKSPIRYSITRSKVFNINDNGTITTSNSLDR |
| | | | | EISAWYNLSITATEKYNIEQISSIPLYVQVLNINDHAPEFSQY |
| | | | | YETYVCENAGSGQVIQTISAVDRDESIEEHHFYFNLSVEDTNN |
| | | | | SSFTIIDNQDNTAVILTNRTGFNLQEEPVFYISILIADNGIPS |
| | | | | LTSTNTLTIHVCDCGDSGSTQTCQYQEIVLSMGFKTE |
| 949 | secreted | Human | nt | atgaactgttatttactgctgcgttttatgttgggaattcctc |
| | Cadherin-19 | | | tcctatggccttgtcttggagcaacagaaaactctcaaacaaa |
| | ecto-domain | | | gaaagtcaagcagccagtgcgatctcatttgagagtgaagcgt |
| | amino acids | | | ggctgggtgtggaaccaattttttgtaccagaggaaatgaata |
| | 1-596) | | | cgactagtcatcacatcggccagctaagatctgatttagacaa |
| | | | | tggaaacaattctttccagtacaagcttttgggagctggagct |
| | | | | ggaagtacttttatcattgatgaaagaacaggtgacatatatg |
| | | | | ccatacagaagcttgatagagaggagcgatccctctacatctt |
| | | | | aagagcccaggtaatagacatcgctactggaagggctgtggaa |
| | | | | cctgagtctgagtttgtcatcaaagtttcggatatcaatgaca |
| | | | | atgaaccaaaattcctagatgaaccttatgaggccattgtacc |
| | | | | agagatgtctccagaaggaacattagttatccaggtgacagca |
| | | | | agtgatgctgacgatccctcaagtggtaataatgctcgtctcc |
| | | | | tctacagcttacttcaaggccagccatatttttctgttgaacc |
| | | | | aacaacaggagtcataagaatatcttctaaaatggatagagaa |
| | | | | ctgcaagatgagtattgggtaatcattcaagccaaggacatga |
| | | | | ttggtcagccaggagcgttgtctggaacaacaagtgtattaat |
| | | | | taaactttcagatgttaatgacaataagcctatatttaaagaa |
| | | | | agtttataccgcttgactgtctctgaatctgcacccactggga |
| | | | | cttctataggaacaatcatggcatatgataatgacataggaga |
| | | | | gaatgcagaaatggattacagcattgaagaggatgattcgcaa |
| | | | | acatttgacattattactaatcatgaaactcaagaaggaatag |
| | | | | ttatattaaaaaagaaagtggattttgagcaccagaaccacta |
| | | | | cggtattagagcaaaagttaaaaaccatcatgttcctgagcag |
| | | | | ctcatgaagtaccacactgaggcttccaccactttcattaaga |
| | | | | tccaggtggaagatgttgatgagcctcctcttttcctccttcc |
| | | | | atattatgtatttgaagtttttgaagaaaccccacagggatca |
| | | | | tttgtaggcgtggtgtctgccacagacccagacaataggaaat |
| | | | | ctcctatcaggtattctattactaggagcaaagtgttcaatat |
| | | | | caatgataatggtacaatcactacaagtaactcactggatcgt |
| | | | | gaaatcagtgcttggtacaacctaagtattacagccacagaaa |
| | | | | aatacaatatagaacagatctcttcgatcccactgtatgtgca |
| | | | | agttcttaacatcaaLgatcatgctcctgagttctctcaatac |
| | | | | tatgagacttatgtttgtgaaaaLgcaggctctggtcaggtaa |
| | | | | ttcagactatcagtgcagtggatagagatgaatccatagaaga |
| | | | | gcaccatttttactttaatctatctgtagaagacactaacaat |
| | | | | tcaagttttacaatcatagataatcaagataacacagctgtca |
| | | | | ttttgactaatagaactggttttaaccttcaagaagaacctgt |
| | | | | cttctacatctccatcttaattgccgacaatggaatcccgtca |
| | | | | cttacaagtacaaacacccttaccatccatgtctgtgactgtg |
| | | | | gtgacagtgggagcacacagacctgccagtaccaggagcttgt |
| | | | | gctttccatgggattcaagacagaa |
| 950 | truncated | Human | aa | MNCYLLLRFMLGIPLLWPCLGATENSQTKKVKQPVRSHLRVKR |
| | membrane | | | GWVWNQFFVPEEMNTTSHHIGQLRSDLDNGNNSFQYKLLGAGA |
| | bound form of | | | GSTFIIDERTGDIYAIQKLDREERSLYILRAQVIDIATGRAVE |
| | human | | | PESEEVIKVSDINDNEPKELDEPYEAIVPEMSPEGTLVIQVTA |
| | cadherin-19 | | | SDADDPSSGNNARLLYSLLQGQPYFSVEPTTGVIRISSKMDRE |
| | amino acids | | | LQDEYWVIIQAKDMIGQPGALSGTTSVLIKLSDVNDNKPIFKE |
| | 1-624) | | | SLYRLTVSESAPTGTSIGTIMAYDNDIGENAEMDYSIEEDDSQ |
| | | | | TEDIITNHETQEGIVILKKKVDFEHQNHYGIRAKVKNHHVPEQ |
| | | | | LMKYHTEASTTFIKIQVEDVDEPPLFLLPYYVFEVFEETPQGS |
| | | | | FVGVVSATDPDNRKSPIRYSITRSKVFNINDNGTITTSNSLDR |
| | | | | EISAWYNLSITATEKYNIEQISSIPLYVQVLNINDHAPEFSQY |
| | | | | YETYVCENAGSGQVIQTISAVDRDESIEEHHEYFNLSVEDTNN |
| | | | | SSETIIDNQDNTAVILTNRTGENLQEEPVFYISILIADNGIPS |
| | | | | LTSTNTLTIHVCDCGDSGSTQTCQYQELVLSMGFKTEVIIAIL |
| | | | | ICIMIIFGFIFLTLGLKQRRKQ |
| 951 | truncated | Humanl | nt | atgaactgttatttactgctgcgttttatgttgggaattcctc |
| | membrane | | | tcctatggccttgtcttggagcaacagaaaactctcaaacaaa |
| | bound form of | | | gaaagtcaagcagccagtgcgatctcatttgagagtgaagcgt |
| | human | | | ggctgggtgtggaaccaattttttgtaccagaggaaatgaata |
| | cadherin-19 | | | cgactagtcatcacatcggccagctaagatctgatttagacaa |
| | (amino acids | | | tggaaacaattctttccagtacaagcttttgggagctggagct |
| | 1-624) | | | ggaagtacttttatcattgatgaaagaacaggtgacatatatg |
| | | | | ccatacagaagcttgatagagaggagcgatccctctacatctt |
| | | | | aagagcccaggtaatagacatcgctactggaagggctgtggaa |
| | | | | cctgagtctgagtttgtcatcaaagtttcggatatcaatgaca |
| | | | | atgaaccaaaattcctagatgaaccttatgaggccattgtacc |
| | | | | agagatgtctccagaaggaacattagttatccaggtgacagca |
| | | | | agtgatgctgacgatccctcaagtggtaataatgctcgtctcc |
| | | | | tctacagcttacttcaaggccagccatatttttctgttgaacc |
| | | | | aacaacaggagtcataagaatatcttctaaaatggatagagaa |
| | | | | ctgcaagatgagtattgggtaatcattcaagccaaggacatga |
| | | | | ttggtcagccaggagcgttgtctggaacaacaagtgtattaat |
| | | | | taaactttcagatgttaatgacaataagcctatatttaaagaa |
| | | | | agtttataccgcttgactgtctctgaatctgcacccactggga |
| | | | | cttctataggaacaatcatggcatatgataatgacataggaga |
| | | | | gaatgcagaaatggattacagcattgaagaggatgattcgcaa |
| | | | | acatttgacattattactaatcatgaaactcaagaaggaatag |
| | | | | ttatattaaaaaagaaagtggattttgagcaccagaaccacta |
| | | | | cggtattagagcaaaagttaaaaaccatcatgttcctgagcag |
| | | | | ctcatgaagtaccacactgaggcttccaccactttcattaaga |
| | | | | tccaggtggaagatgttgatgagcctcctcttttcctccttcc |
| | | | | atattatgtatttgaagtttttgaagaaaccccacagggatca |
| | | | | tttgtaggcgtggtgtctgccacagacccagacaataggaaat |
| | | | | ctcctatcaggtattctattactaggagcaaagtgttcaatat |
| | | | | caatgataatggtacaatcactacaagtaactcactggatcgt |
| | | | | gaaatcagtgcttggtacaacctaagtattacagccacagaaa |
| | | | | aatacaatatagaacagatctcttcgatcccactgtatgtgca |
| | | | | agttcttaacatcaatgatcatgctcctgagttctctcaatac |
| | | | | tatgagacttatgtttgtgaaaatgcaggctctggtcaggtaa |
| | | | | ttcagactatcagtgcagtggatagagatgaatccatagaaga |
| | | | | gcaccatttttactttaatctatctgtagaagacactaacaat |
| | | | | tcaagttttacaatcatagataatcaagataacacagctgtca |
| | | | | ttttgactaatagaactggttttaaccttcaagaagaacctgt |
| | | | | cttctacatctccatcttaattgccgacaatggaatcccgtca |
| | | | | cttacaagtacaaacacccttaccatccatgtctgtgactgtg |
| | | | | gtgacagtgggagcacacagacctgccagtaccaggagcttgt |
| | | | | gctttccatgggattcaagacagaagtcatcattgctattctc |
| | | | | atttgcattatgatcatatttgggtttatttttttgactttgg |
| | | | | gtttaaaacaacggagaaaacag |
| 952 | C137897 | artificial | aa | GWVWNQFFVPEEMNTTSHHIGQLRSDLDNGNNSFQYKLLGAGA |
| | huCDH19 | | | GSTFIIDERTGDIYAIQKLDREERSLYILRAQVIDIATGRAVE |
| | (44-141) | | | PESEEVIKVSDINDNEPRELDEPYEAIVPEMSPEGTEVIKVTA |
| | muCDH19 | | | NDADDPSTGYHARILYNLERGQPYFSVEPTTGVIRISSKMDRE |
| | (140-770) | | | LQDTYCVIIQAKDMLGQPGALSGTTTVSIKLSDINDNKPIFKE |
| | | | | SFYRFTISESAPIGTSIGKIMAYDDDIGENAEMEYSIEDDDSK |
| | | | | IFDIIIDNDTQEGIVILKKKVDFEQQSYYGIRAKVKNCHVDEE |
| | | | | LAPAHVNASTTYIKVQVEDEDEPPVFLLPYYILEIPEGKPYGT |
| | | | | IVGTVSATDPDRRQSPMRYYLTGSKMFDINDNGTIITTNMLDR |
| | | | | EVSAWYNLTVTATETYNVQQISSAHVYVQVFNINDNAPEFSQF |
| | | | | YETYVCENAESGEIVQIISAIDRDESIEDHHEYENHSLEDTNN |
| | | | | SSFMLTDNQDNTAVILSNRTGENLKEEPVEYMIILIADNGIPS |
| | | | | LTSTNTLTIQVCDCGDSRNTETCANKGLLFIMGFRTEAIIAIM |
| | | | | ICVMVIFGEFFLILALKQRRKETLFPEKTEDFRENIFCYDDEG |
| | | | | GGEEDSEAFDIVELRQSTVMRERKPQRSKSAEIRSLYRQSLQV |
| | | | | GPDSAIFRKFILEKLEEANTDPCAPPFDSLQTFAYEGTGSSAG |
| | | | | SLSSLASRDTDQEDDFDYLNDLGPRFKRLASMFGSAVQPNN |
| 953 | C137897 | artificial | nt | ggctgggtgtggaaccaattttttgtaccagaggaaatgaata |
| | huCDH19 | | | cgactagtcatcacatcggccagctaagatctgatttagacaa |
| | (44-141) | | | tggaaacaattctttccagtacaagcttttgggagctggagct |
| | muCDH19 | | | ggaagtacttttatcattgatgaaagaacaggtgacatatatg |
| | (140-770) | | | ccatacagaagcttgatagagaggagcgatccctctacatctt |
| | | | | aagagcccaggtaatagacatcgctactggaagggctgtggaa |
| | | | | cctgagtctgagtttgtcatcaaagtttcggatatcaatgaca |
| | | | | atgaacccagattcctagatgaaccatatgaggccattgtacc |
| | | | | tgagatgtctccagaaggaacatttgtcatcaaggtgacagcc |
| | | | | aatgacgcagatgatccttcaactggctatcatgctcgcatcc |
| | | | | tatacaacttagaacgaggtcaaccatacttttctgttgagcc |
| | | | | aacaacaggagtcataaggatatcttctaagatggatagagag |
| | | | | ttgcaagatacatactgtgtaattattcaagccaaggacatgc |
| | | | | tcggtcagcctggagccttgtctggaacaacaaccgtatcaat |
| | | | | taagctgtcagatattaatgacaacaagccaatattcaaagaa |
| | | | | agtttctaccgcttcactatatctgaatctgcacccattggaa |
| | | | | catcaatagggaaaattatggcatatgatgatgacatagggga |
| | | | | gaatgcagagatggagtacagcattgaagatgatgattcaaaa |
| | | | | atatttgacataatcattgacaatgacacccaagaagggatag |
| | | | | ttatacttaaaaagaaagttgattttgagcagcagagctatta |
| | | | | tggcattagagctaaggttaaaaactgccatgtggatgaagag |
| | | | | cttgcacctgcccatgttaacgcttccacaacctacattaaag |
| | | | | ttcaagtagaagatgaagatgaacctcctgttttcctcttacc |
| | | | | atattacatacttgaaattcctgaaggaaaaccatatggaaca |
| | | | | attgtggggacggtttctgccacagacccagatcgaagacaat |
| | | | | ctcctatgagatattatctcactggaagcaaaatgtttgatat |
| | | | | caatgacaatggaacaataatcaccactaacatgcttgacaga |
| | | | | gaggtcagtgcttggtacaacttgactgtcacagctactgaaa |
| | | | | catacaatgtacaacagatctcttcagcccatgtttatgtaca |
| | | | | agtctttaacattaacgacaatgctccagagttctctcaattc |
| | | | | tatgagacttatgtttgtgaaaatgctgaatctggtgagatag |
| | | | | ttcagatcatcagtgcaattgatagagatgagtccatagaaga |
| | | | | tcaccatttttactttaatcactctctggaagacacaaacaac |
| | | | | tcaagttttatgctaacagacaatcaagataacacagctgtaa |
| | | | | ttctgagtaatagaactggtttcaatcttaaagaagagcctgt |
| | | | | cttctacatgatcatcttgattgctgataacgggatcccatct |
| | | | | ctcacaagcacaaacactctcactatccaagtctgtgactgtg |
| | | | | gagacagtagaaacacagaaacttgtgctaacaagggacttct |
| | | | | ctttatcatgggattcagaacagaggcaataattgccatcatg |
| | | | | atatgtgttatggtaatatttgggtttttctttttgattcttg |
| | | | | ctctgaaacagcgaagaaaggagactctatttccagagaagac |
| | | | | tgaagactttagggagaatatattttgctatgatgatgaaggc |
| | | | | ggcggggaagaagactcggaagcctttgacatcgtagagctga |
| | | | | gacaaagtacagtaatgagagaaagaaagcctcagagaagcaa |
| | | | | gagtgcggagatcaggagcttgtacaggcagtccctgcaggtg |
| | | | | ggcccagacagtgccatatttcgaaaatttatcctagagaagc |
| | | | | ttgaagaagccaacacagacccatgtgctcccccctttgattc |
| | | | | actacagacgtttgcctatgagggaacagggtcatcagctggc |
| | | | | tctctgagctccttggcatccagagacactgatcaggaggatg |
| | | | | acttcgactaccttaatgacctgggacctcgttttaaaagatt |
| | | | | agcaagcatgtttggctctgcagtacaacccaacaattag |
| 954 | C137896 | artificial | aa | GWVWNQFFVPEEMNTTSHHIGQLRSDLDNGNNSFQYKLLGAGA |
| | huCDH19 | | | GSTFIIDERTGDIYAIQKLDREERSLYILRAQVIDIATGRAVE |
| | (44-249) | | | PESEEVIKVSDINDNEPKELDEPYEAIVPEMSPEGTLVIQVTA |
| | muCDH19 | | | SDADDPSSGNNARLLYSLLQGQPYFSVEPTTGVIRISSKMDRE |
| | (248-770) | | | LQDEYWVIIQAKDMIGQPGALSGTTSVLIKLSDVNDNKPIFKE |
| | | | | SFYRFTISESAPIGTSIGKIMAYDDDIGENAEMEYSIEDDDSK |
| | | | | IFDIIIDNDTQEGIVILKKKVDFEQQSYYGIRAKVKNCHVDEE |
| | | | | LAPAHVNASTTYIKVQVEDEDEPPVFLLPYYILEIPEGKPYGT |
| | | | | IVGTVSATDPDRRQSPMRYYLTGSKMFDINDNGTIITTNMLDR |
| | | | | EVSAWYNLTVTATETYNVQQISSAHVYVQVFNINDNAPEFSQF |
| | | | | YETYVCENAESGEIVQIISAIDRDESIEDHHEYENHSLEDTNN |
| | | | | SSFMLTDNQDNTAVILSNRTGENLKEEPVEYMIILIADNGIPS |
| | | | | LTSTNTLTIQVCDCGDSRNTETCANKGLLFIMGFRTEAIIAIM |
| | | | | ICVMVIFGEFFLILALKQRRKETLFPEKTEDFRENIFCYDDEG |
| | | | | GGEEDSEAFDIVELRQSTVMRERKPQRSKSAEIRSLYRQSLQV |
| | | | | GPDSAIFRKFILEKLEEANTDPCAPPFDSLQTFAYEGTGSSAG |
| | | | | SLSSLASRDTDQEDDFDYLNDLGPRFKRLASMFGSAVQPNN |
| 955 | C137896 | artificial | nt | ggctgggtgtggaaccaattttttgtaccagaggaaatgaata |
| | huCDH19 | | | cgactagtcatcacatcggccagctaagatctgatttagacaa |
| | (44-249) | | | tggaaacaattctttccagtacaagcttttgggagctggagct |
| | muCDH19 | | | ggaagtacttttatcattgatgaaagaacaggtgacatatatg |
| | (248-770) | | | ccatacagaagcttgatagagaggagcgatccctctacatctt |
| | | | | aagagcccaggtaatagacatcgctactggaagggctgtggaa |
| | | | | cctgagtctgagtttgtcatcaaagtttcggatatcaatgaca |
| | | | | atgaaccaaaattcctagatgaaccttatgaggccattgtacc |
| | | | | agagatgtctccagaaggaacattagttatccaggtgacagca |
| | | | | agtgatgctgacgatccctcaagtggtaataatgctcgtctcc |
| | | | | tctacagcttacttcaaggccagccatatttttctgttgaacc |
| | | | | aacaacaggagtcataagaatatcttctaaaatggatagagaa |
| | | | | ctgcaagatgagtattgggtaatcattcaagccaaggacatga |
| | | | | ttggtcagccaggagcgttgtctggaacaacaagtgtattaat |
| | | | | taaactttcagatgttaatgacaacaagccaatattcaaagaa |
| | | | | agtttctaccgcttcactatatctgaatctgcacccattggaa |
| | | | | catcaatagggaaaattatggcatatgatgatgacatagggga |
| | | | | gaatgcagagatggagtacagcattgaagatgatgattcaaaa |
| | | | | atatttgacataatcattgacaatgacacccaagaagggatag |
| | | | | ttatacttaaaaagaaagttgattttgagcagcagagctatta |
| | | | | tggcattagagctaaggttaaaaactgccatgtggatgaagag |
| | | | | cttgcacctgcccatgttaacgcttccacaacctacattaaag |
| | | | | ttcaagtagaagatgaagatgaacctcctgttttcctcttacc |
| | | | | atattacatacttgaaattcctgaaggaaaaccatatggaaca |
| | | | | attgtggggacggtttctgccacagacccagatcgaagacaat |
| | | | | ctcctatgagatattatctcactggaagcaaaatgtttgatat |
| | | | | caatgacaatggaacaataatcaccactaacatgcttgacaga |
| | | | | gaggtcagtgcttggtacaacttgactgtcacagctactgaaa |
| | | | | catacaatgtacaacagatctcttcagcccatgtttatgtaca |
| | | | | agtctttaacattaacgacaatgctccagagttctctcaattc |
| | | | | tatgagacttatgtttgtgaaaatgctgaatctggtgagatag |
| | | | | ttcagatcatcagtgcaattgatagagatgagtccatagaaga |
| | | | | tcaccatttttactttaatcactctctggaagacacaaacaac |
| | | | | tcaagttttatgctaacagacaatcaagataacacagctgtaa |
| | | | | ttctgagtaatagaactggtttcaatcttaaagaagagcctgt |
| | | | | cttctacatgatcatcttgattgctgataacgggatcccatct |
| | | | | ctcacaagcacaaacactctcactatccaagtctgtgactgtg |
| | | | | gagacagtagaaacacagaaacttgtgctaacaagggacttct |
| | | | | ctttatcatgggattcagaacagaggcaataattgccatcatg |
| | | | | atatgtgttatggtaatatttgggtttttctttttgattcttg |
| | | | | ctctgaaacagcgaagaaaggagactctatttccagagaagac |
| | | | | tgaagactttagggagaatatattttgctatgatgatgaaggc |
| | | | | ggcggggaagaagactcggaagcctttgacatcgtagagctga |
| | | | | gacaaagtacagtaatgagagaaagaaagcctcagagaagcaa |
| | | | | gagtgcggagatcaggagcttgtacaggcagtccctgcaggtg |
| | | | | ggcccagacagtgccatatttcgaaaatttatcctagagaagc |
| | | | | ttgaagaagccaacacagacccatgtgctcccccctttgattc |
| | | | | actacagacgtttgcctatgagggaacagggtcatcagctggc |
| | | | | tctctgagctccttggcatccagagacactgatcaggaggatg |
| | | | | acttcgactaccttaatgacctgggacctcgttttaaaagatt |
| | | | | agcaagcatgtttggctctgcagtacaacccaacaattag |
| 956 | C137913 | artificial | aa | AWVWRPFVVLEEMDDIQCVGKLRSDLDNGNNSFQYKLLGIGAG |
| | muCDH19 | | | SFSINERTGEICAIQKLDREEKSLYILRAQVIDTTIGKAVETE |
| | (44-139) | | | SEEVIRVLDINDNEPKELDEPYEAIVPEMSPEGTLVIQVTASD |
| | huCDH19 | | | ADDPSSGNNARLLYSLLQGQPYFSVEPTTGVIRISSKMDRELQ |
| | (142-249) | | | DEYWVIIQAKDMIGQPGALSGTTSVLIKLSDVNDNKPIFKESF |
| | muCDH19 | | | YRFTISESAPIGTSIGKIMAYDDDIGENAEMEYSIEDDDSKIF |
| | (248-770) | | | DIIIDNDTQEGIVILKKKVDFEQQSYYGIRAKVKNCHVDEELA |
| | | | | PAHVNASTTYIKVQVEDEDEPPVFLLPYYILEIPEGKPYGTIV |
| | | | | GTVSATDPDRRQSPMRYYLTGSKMFDINDNGTIITTNMLDREV |
| | | | | SAWYNLTVTATETYNVQQISSAHVYVQVFNINDNAPEFSQFYE |
| | | | | TYVCENAESGEIVQIISAIDRDESIEDHHEYENHSLEDTNNSS |
| | | | | FMLTDNQDNTAVILSNRTGENLKEEPVEYMIILIADNGIPSLT |
| | | | | STNTLTIQVCDCGDSRNTETCANKGLLFIMGFRTEAIIAIMIC |
| | | | | VMVIFGEFFLILALKQRRKETLFPEKTEDFRENIFCYDDEGGG |
| | | | | EEDSEAFDIVELRQSTVMRERKPQRSKSAEIRSLYRQSLQVGP |
| | | | | DSAIFRKFILEKLEEANTDPCAPPFDSLQTFAYEGTGSSAGSL |
| | | | | SSLASRDTDQEDDFDYLNDLGPRFKRLASMFGSAVQPNN |
| 957 | C137913 | artificial | nt | gcctgggtgtggagaccatttgttgttctagaagaaatggatg |
| | muCDH19 | | | atatacaatgtgttggaaagctaagatctgacttagacaatgg |
| | (44-139) | | | aaacaactctttccagtacaagctactggggattggcgctgga |
| | huCDH19 | | | agctttagcattaatgaaagaacaggtgaaatatgtgccatac |
| | (142-249) | | | agaagcttgatagagaggaaaaatccctctacattctgagagc |
| | muCDH19 | | | ccaggtaatagacaccactattgggaaggctgtggaaactgaa |
| | (248-770) | | | tccgagtttgtcatcagagttttggatatcaatgacaatgaac |
| | | | | caaaattcctagatgaaccttatgaggccattgtaccagagat |
| | | | | gtctccagaaggaacattagttatccaggtgacagcaagtgat |
| | | | | gctgacgatccctcaagtggtaataatgctcgtctcctctaca |
| | | | | gcttacttcaaggccagccatatttttctgttgaaccaacaac |
| | | | | aggagtcataagaatatcttctaaaatggatagagaactgcaa |
| | | | | gatgagtattgggtaatcattcaagccaaggacatgattggtc |
| | | | | agccaggagcgttgtctggaacaacaagtgtattaattaaact |
| | | | | ttcagatgttaatgacaacaagccaatattcaaagaaagtttc |
| | | | | taccgcttcactatatctgaatctgcacccattggaacatcaa |
| | | | | tagggaaaattatggcatatgatgatgacataggggagaatgc |
| | | | | agagatggagtacagcattgaagatgatgattcaaaaatattt |
| | | | | gacataatcattgacaatgacacccaagaagggatagttatac |
| | | | | ttaaaaagaaagttgattttgagcagcagagctattatggcat |
| | | | | tagagctaaggttaaaaactgccatgtggatgaagagcttgca |
| | | | | cctgcccatgttaacgcttccacaacctacattaaagttcaag |
| | | | | tagaagatgaagatgaacctcctgttttcctcttaccatatta |
| | | | | catacttgaaattcctgaaggaaaaccatatggaacaattgtg |
| | | | | gggacggtttctgccacagacccagatcgaagacaatctccta |
| | | | | tgagatattatctcactggaagcaaaatgtttgatatcaatga |
| | | | | caatggaacaataatcaccactaacatgcttgacagagaggtc |
| | | | | agtgcttggtacaacttgactgtcacagctactgaaacataca |
| | | | | atgtacaacagatctcttcagcccatgtttatgtacaagtctt |
| | | | | taacattaacgacaatgctccagagttctctcaattctatgag |
| | | | | acttatgtttgtgaaaatgctgaatctggtgagatagttcaga |
| | | | | tcatcagtgcaattgatagagatgagtccatagaagatcacca |
| | | | | tttttactttaatcactctctggaagacacaaacaactcaagt |
| | | | | tttatgctaacagacaatcaagataacacagctgtaattctga |
| | | | | gtaatagaactggtttcaatcttaaagaagagcctgtcttcta |
| | | | | catgatcatcttgattgctgataacgggatcccatctctcaca |
| | | | | agcacaaacactctcactatccaagtctgtgactgtggagaca |
| | | | | gtagaaacacagaaacttgtgctaacaagggacttctctttat |
| | | | | catgggattcagaacagaggcaataattgccatcatgatatgt |
| | | | | gttatggtaatatttgggtttttctttttgattcttgctctga |
| | | | | aacagcgaagaaaggagactctatttccagagaagactgaaga |
| | | | | ctttagggagaatatattttgctatgatgatgaaggcggcggg |
| | | | | gaagaagactcggaagcctttgacatcgtagagctgagacaaa |
| | | | | gtacagtaatgagagaaagaaagcctcagagaagcaagagtgc |
| | | | | ggagatcaggagcttgtacaggcagtccctgcaggtgggccca |
| | | | | gacagtgccatatttcgaaaatttatcctagagaagcttgaag |
| | | | | aagccaacacagacccatgtgctcccccctttgattcactaca |
| | | | | gacgtttgcctatgagggaacagggtcatcagctggctctctg |
| | | | | agctccttggcatccagagacactgatcaggaggatgacttcg |
| | | | | actaccttaatgacctgggacctcgttttaaaagattagcaag |
| | | | | catgtttggctctgcagtacaacccaacaattag |
| 958 | C137847 | artificial | aa | AWVWRPFVVLEEMDDIQCVGKLRSDLDNGNNSFQYKLLGIGAG |
| | muCDH19 | | | SFSINERTGEICAIQKLDREEKSLYILRAQVIDTTIGKAVETE |
| | (44-139) | | | SEEVIRVLDINDNEPKELDEPYEAIVPEMSPEGTLVIQVTASD |
| | huCDH19 | | | ADDPSSGNNARLLYSLLQGQPYFSVEPTTGVIRISSKMDRELQ |
| | (142-364) | | | DEYWVIIQAKDMIGQPGALSGTTSVLIKLSDVNDNKPIFKESL |
| | muCDH19 | | | YRLTVSESAPTGTSIGTIMAYDNDIGENAEMDYSIEEDDSQTF |
| | (363-770) | | | DIITNHETQEGIVILKKKVDFEHQNHYGIRAKVKNHHVPEQLM |
| | | | | KYHTEASTTFIKIQVEDVDEPPVFLLPYYILEIPEGKPYGTIV |
| | | | | GTVSATDPDRRQSPMRYYLTGSKMFDINDNGTIITTNMLDREV |
| | | | | SAWYNLTVTATETYNVQQISSAHVYVQVFNINDNAPEFSQFYE |
| | | | | TYVCENAESGEIVQIISAIDRDESIEDHHEYENHSLEDTNNSS |
| | | | | FMLTDNQDNTAVILSNRTGENLKEEPVEYMIILIADNGIPSLT |
| | | | | STNTLTIQVCDCGDSRNTETCANKGLLFIMGFRTEAIIAIMIC |
| | | | | VMVIFGEFFLILALKQRRKETLFPEKTEDFRENIFCYDDEGGG |
| | | | | EEDSEAFDIVELRQSTVMRERKPQRSKSAEIRSLYRQSLQVGP |
| | | | | DSAIFRKFILEKLEEANTDPCAPPFDSLQTFAYEGTGSSAGSL |
| | | | | SSLASRDTDQEDDFDYLNDLGPRFKRLASMFGSAVQPNN |
| 959 | C137847 | artificial | nt | gcctgggtgtggagaccatttgttgttctagaagaaatggatg |
| | muCDH19 | | | atatacaatgtgttggaaagctaagatctgacttagacaatgg |
| | (44-139) | | | aaacaactctttccagtacaagctactggggattggcgctgga |
| | huCDH19 | | | agctttagcattaatgaaagaacaggtgaaatatgtgccatac |
| | (142-364) | | | agaagcttgatagagaggaaaaatccctctacattctgagagc |
| | muCDH19 | | | ccaggtaatagacaccactattgggaaggctgtggaaactgaa |
| | (363-770) | | | tccgagtttgtcatcagagttttggatatcaatgacaatgaac |
| | | | | caaaattcctagatgaaccttatgaggccattgtaccagagat |
| | | | | gtctccagaaggaacattagttatccaggtgacagcaagtgat |
| | | | | gctgacgatccctcaagtggtaataatgctcgtctcctctaca |
| | | | | gcttacttcaaggccagccatatttttctgttgaaccaacaac |
| | | | | aggagtcataagaatatcttctaaaatggatagagaactgcaa |
| | | | | gatgagtattgggtaatcattcaagccaaggacatgattggtc |
| | | | | agccaggagcgttgtctggaacaacaagtgtattaattaaact |
| | | | | ttcagatgttaatgacaataagcctatatttaaagaaagttta |
| | | | | taccgcttgactgtctctgaatctgcacccactgggacttcta |
| | | | | taggaacaatcatggcatatgataatgacataggagagaatgc |
| | | | | agaaatggattacagcattgaagaggatgattcgcaaacattt |
| | | | | gacattattactaatcatgaaactcaagaaggaatagttatat |
| | | | | taaaaaagaaagtggattttgagcaccagaaccactacggtat |
| | | | | tagagcaaaagttaaaaaccatcatgttcctgagcagctcatg |
| | | | | aagtaccacactgaggcttccaccactttcattaagatccagg |
| | | | | tggaagatgttgatgaacctcctgttttcctcttaccatatta |
| | | | | catacttgaaattcctgaaggaaaaccatatggaacaattgtg |
| | | | | gggacggtttctgccacagacccagatcgaagacaatctccta |
| | | | | tgagatattatctcactggaagcaaaatgtttgatatcaatga |
| | | | | caatggaacaataatcaccactaacatgcttgacagagaggtc |
| | | | | agtgcttggtacaacttgactgtcacagctactgaaacataca |
| | | | | atgtacaacagatctcttcagcccatgtttatgtacaagtctt |
| | | | | taacattaacgacaatgctccagagttctctcaattctatgag |
| | | | | acttatgtttgtgaaaatgctgaatctggtgagatagttcaga |
| | | | | tcatcagtgcaattgatagagatgagtccatagaagatcacca |
| | | | | tttttactttaatcactctctggaagacacaaacaactcaagt |
| | | | | tttatgctaacagacaatcaagataacacagctgtaattctga |
| | | | | gtaatagaactggtttcaatcttaaagaagagcctgtcttcta |
| | | | | catgatcatcttgattgctgataacgggatcccatctctcaca |
| | | | | agcacaaacactctcactatccaagtctgtgactgtggagaca |
| | | | | gtagaaacacagaaacttgtgctaacaagggacttctctttat |
| | | | | catgggattcagaacagaggcaataattgccatcatgatatgt |
| | | | | gttatggtaatatttgggtttttctttttgattcttgctctga |
| | | | | aacagcgaagaaaggagactctatttccagagaagactgaaga |
| | | | | ctttagggagaatatattttgctatgatgatgaaggcggcggg |
| | | | | gaagaagactcggaagcctttgacatcgtagagctgagacaaa |
| | | | | gtacagtaatgagagaaagaaagcctcagagaagcaagagtgc |
| | | | | ggagatcaggagcttgtacaggcagtccctgcaggtgggccca |
| | | | | gacagtgccatatttcgaaaatttatcctagagaagcttgaag |
| | | | | aagccaacacagacccatgtgctcccccctttgattcactaca |
| | | | | gacgtttgcctatgagggaacagggtcatcagctggctctctg |
| | | | | agctccttggcatccagagacactgatcaggaggatgacttcg |
| | | | | actaccttaatgacctgggacctcgttttaaaagattagcaag |
| | | | | catgtttggctctgcagtacaacccaacaattag |
| 960 | C137911 | artificial | aa | AWVWRPFVVLEEMDDIQCVGKLRSDLDNGNNSFQYKLLGIGAG |
| | muCDH19 | | | SFSINERTGEICAIQKLDREEKSLYILRAQVIDTTIGKAVETE |
| | (44-247) | | | SEEVIRVLDINDNEPRELDEPYEAIVPEMSPEGTEVIKVTAND |
| | huCDH19 | | | ADDPSTGYHARILYNLERGQPYFSVEPTTGVIRISSKMDRELQ |
| | (250-364) | | | DTYCVIIQAKDMLGQPGALSGTTTVSIKLSDINDNKPIFKESL |
| | muCDH19 | | | YRLTVSESAPTGTSIGTIMAYDNDIGENAEMDYSIEEDDSQTF |
| | (363-770) | | | DIITNHETQEGIVILKKKVDFEHQNHYGIRAKVKNHHVPEQLM |
| | | | | KYHTEASTTFIKIQVEDVDEPPVFLLPYYILEIPEGKPYGTIV |
| | | | | GTVSATDPDRRQSPMRYYLTGSKMFDINDNGTIITTNMLDREV |
| | | | | SAWYNLTVTATETYNVQQISSAHVYVQVFNINDNAPEFSQFYE |
| | | | | TYVCENAESGEIVQIISAIDRDESIEDHHEYENHSLEDTNNSS |
| | | | | FMLTDNQDNTAVILSNRTGENLKEEPVEYMIILIADNGIPSLT |
| | | | | STNTLTIQVCDCGDSRNTETCANKGLLFIMGFRTEAIIAIMIC |
| | | | | VMVIFGEFFLILALKQRRKETLFPEKTEDFRENIFCYDDEGGG |
| | | | | EEDSEAFDIVELRQSTVMRERKPQRSKSAEIRSLYRQSLQVGP |
| | | | | DSAIFRKFILEKLEEANTDPCAPPFDSLQTFAYEGTGSSAGSL |
| | | | | SSLASRDTDQEDDFDYLNDLGPRFKRLASMFGSAVQPNN |
| 961 | C137911 | artificial | nt | gcctgggtgtggagaccatttgttgttctagaagaaatggatg |
| | muCDH19 | | | atatacaatgtgttggaaagctaagatctgacttagacaatgg |
| | (44-247) | | | aaacaactctttccagtacaagctactggggattggcgctgga |
| | huCDH19 | | | agctttagcattaatgaaagaacaggtgaaatatgtgccatac |
| | (250-364) | | | agaagcttgatagagaggaaaaatccctctacattctgagagc |
| | muCDH19 | | | ccaggtaatagacaccactattgggaaggctgtggaaactgaa |
| | (363-770) | | | tccgagtttgtcatcagagttttggatatcaatgacaatgaac |
| | | | | ccagattcctagatgaaccatatgaggccattgtacctgagat |
| | | | | gtctccagaaggaacatttgtcatcaaggtgacagccaatgac |
| | | | | gcagatgatccttcaactggctatcatgctcgcatcctataca |
| | | | | acttagaacgaggtcaaccatacttttctgttgagccaacaac |
| | | | | aggagtcataaggatatcttctaagatggatagagagttgcaa |
| | | | | gatacatactgtgtaattattcaagccaaggacatgctcggtc |
| | | | | agcctggagccttgtctggaacaacaaccgtatcaattaagct |
| | | | | gtcagatattaatgacaataagcctatatttaaagaaagttta |
| | | | | taccgcttgactgtctctgaatctgcacccactgggacttcta |
| | | | | taggaacaatcatggcatatgataatgacataggagagaatgc |
| | | | | agaaatggattacagcattgaagaggatgattcgcaaacattt |
| | | | | gacattattactaatcatgaaactcaagaaggaatagttatat |
| | | | | taaaaaagaaagtggattttgagcaccagaaccactacggtat |
| | | | | tagagcaaaagttaaaaaccatcatgttcctgagcagctcatg |
| | | | | aagtaccacactgaggcttccaccactttcattaagatccagg |
| | | | | tggaagatgttgatgaacctcctgttttcctcttaccatatta |
| | | | | catacttgaaattcctgaaggaaaaccatatggaacaattgtg |
| | | | | gggacggtttctgccacagacccagatcgaagacaatctccta |
| | | | | tgagatattatctcactggaagcaaaatgtttgatatcaatga |
| | | | | caatggaacaataatcaccactaacatgcttgacagagaggtc |
| | | | | agtgcttggtacaacttgactgtcacagctactgaaacataca |
| | | | | atgtacaacagatctcttcagcccatgtttatgtacaagtctt |
| | | | | taacattaacgacaatgctccagagttctctcaattctatgag |
| | | | | acttatgtttgtgaaaatgctgaatctggtgagatagttcaga |
| | | | | tcatcagtgcaattgatagagatgagtccatagaagatcacca |
| | | | | tttttactttaatcactctctggaagacacaaacaactcaagt |
| | | | | tttatgctaacagacaatcaagataacacagctgtaattctga |
| | | | | gtaatagaactggtttcaatcttaaagaagagcctgtcttcta |
| | | | | catgatcatcttgattgctgataacgggatcccatctctcaca |
| | | | | agcacaaacactctcactatccaagtctgtgactgtggagaca |
| | | | | gtagaaacacagaaacttgtgctaacaagggacttctctttat |
| | | | | catgggattcagaacagaggcaataattgccatcatgatatgt |
| | | | | gttatggtaatatttgggtttttctttttgattcttgctctga |
| | | | | aacagcgaagaaaggagactctatttccagagaagactgaaga |
| | | | | ctttagggagaatatattttgctatgatgatgaaggcggcggg |
| | | | | gaagaagactcggaagcctttgacatcgtagagctgagacaaa |
| | | | | gtacagtaatgagagaaagaaagcctcagagaagcaagagtgc |
| | | | | ggagatcaggagcttgtacaggcagtccctgcaggtgggccca |
| | | | | gacagtgccatatttcgaaaatttatcctagagaagcttgaag |
| | | | | aagccaacacagacccatgtgctcccccctttgattcactaca |
| | | | | gacgtttgcctatgagggaacagggtcatcagctggctctctg |
| | | | | agctccttggcatccagagacactgatcaggaggatgacttcg |
| | | | | actaccttaatgacctgggacctcgttttaaaagattagcaag |
| | | | | catgtttggctctgcagtacaacccaacaattag |
| 962 | C137917 | artificial | aa | AWVWRPFVVLEEMDDIQCVGKLRSDLDNGNNSFQYKLLGIGAG |
| | muCDH19 | | | SFSINERTGEICAIQKLDREEKSLYILRAQVIDTTIGKAVETE |
| | (44-362) | | | SEEVIRVLDINDNEPRELDEPYEAIVPEMSPEGTEVIKVTAND |
| | huCDH19 | | | ADDPSTGYHARILYNLERGQPYFSVEPTTGVIRISSKMDRELQ |
| | (365-772) | | | DTYCVIIQAKDMLGQPGALSGTTTVSIKLSDINDNKPIFKESF |
| | | | | YRFTISESAPIGTSIGKIMAYDDDIGENAEMEYSIEDDDSKIF |
| | | | | DIIIDNDTQEGIVILKKKVDFEQQSYYGIRAKVKNCHVDEELA |
| | | | | PAHVNASTTYIKVQVEDEDEPPLELLPYYVFEVFEETPQGSFV |
| | | | | GVVSATDPDNRKSPIRYSITRSKVFNINDNGTITTSNSLDREI |
| | | | | SAWYNLSITATEKYNIEQISSIPLYVQVLNINDHAPEFSQYYE |
| | | | | TYVCENAGSGQVIQTISAVDRDESIEEHHEYFNLSVEDTNNSS |
| | | | | FTIIDNQDNTAVILTNRTGENLQEEPVFYISILIADNGIPSLT |
| | | | | STNTLTIHVCDCGDSGSTQTCQYQELVLSMGFKTEVIIAILIC |
| | | | | IMIIFGFIFLTLGLKQRRKQILFPEKSEDFRENIFQYDDEGGG |
| | | | | EEDTEAFDIAELRSSTIMRERKTRKTTSAEIRSLYRQSLQVGP |
| | | | | DSAIFRKFILEKLEEANTDPCAPPFDSLQTYAFEGTGSLAGSL |
| | | | | SSLESAVSDQDESYDYLNELGPRFKRLACMFGSAVQSNN |
| 963 | C137917 | artificial | nt | gcctgggtgtggagaccatttgttgttctagaagaaatggatg |
| | muCDH19 | | | atatacaatgtgttggaaagctaagatctgacttagacaatgg |
| | (44-362) | | | aaacaactctttccagtacaagctactggggattggcgctgga |
| | huCDH19 | | | agctttagcattaatgaaagaacaggtgaaatatgtgccatac |
| | (365-772) | | | agaagcttgatagagaggaaaaatccctctacattctgagagc |
| | | | | ccaggtaatagacaccactattgggaaggctgtggaaactgaa |
| | | | | tccgagtttgtcatcagagttttggatatcaatgacaatgaac |
| | | | | ccagattcctagatgaaccatatgaggccattgtacctgagat |
| | | | | gtctccagaaggaacatttgtcatcaaggtgacagccaatgac |
| | | | | gcagatgatccttcaactggctatcatgctcgcatcctataca |
| | | | | acttagaacgaggtcaaccatacttttctgttgagccaacaac |
| | | | | aggagtcataaggatatcttctaagatggatagagagttgcaa |
| | | | | gatacatactgtgtaattattcaagccaaggacatgctcggtc |
| | | | | agcctggagccttgtctggaacaacaaccgtatcaattaagct |
| | | | | gtcagatattaatgacaacaagccaatattcaaagaaagtttc |
| | | | | taccgcttcactatatctgaatctgcacccattggaacatcaa |
| | | | | tagggaaaattatggcatatgatgatgacataggggagaatgc |
| | | | | agagatggagtacagcattgaagatgatgattcaaaaatattt |
| | | | | gacataatcattgacaatgacacccaagaagggatagttatac |
| | | | | ttaaaaagaaagttgattttgagcagcagagctattatggcat |
| | | | | tagagctaaggttaaaaactgccatgtggatgaagagcttgca |
| | | | | cctgcccatgttaacgcttccacaacctacattaaagttcaag |
| | | | | tagaagatgaagatgagcctcctcttttcctccttccatatta |
| | | | | tgtatttgaagtttttgaagaaaccccacagggatcatttgta |
| | | | | ggcgtggtgtctgccacagacccagacaataggaaatctccta |
| | | | | tcaggtattctattactaggagcaaagtgttcaatatcaatga |
| | | | | taatggtacaatcactacaagtaactcactggatcgtgaaatc |
| | | | | agtgcttggtacaacctaagtattacagccacagaaaaataca |
| | | | | atatagaacagatctcttcgatcccactgtatgtgcaagttct |
| | | | | taacatcaatgatcatgctcctgagttctctcaatactatgag |
| | | | | acttatgtttgtgaaaatgcaggctctggtcaggtaattcaga |
| | | | | ctatcagtgcagtggatagagatgaatccatagaagagcacca |
| | | | | tttttactttaatctatctgtagaagacactaacaattcaagt |
| | | | | tttacaatcatagataatcaagataacacagctgtcattttga |
| | | | | ctaatagaactggttttaaccttcaagaagaacctgtcttcta |
| | | | | catctccatcttaattgccgacaatggaatcccgtcacttaca |
| | | | | agtacaaacacccttaccatccatgtctgtgactgtggtgaca |
| | | | | gtgggagcacacagacctgccagtaccaggagcttgtgctttc |
| | | | | catgggattcaagacagaagtcatcattgctattctcatttgc |
| | | | | attatgatcatatttgggtttatttttttgactttgggtttaa |
| | | | | aacaacggagaaaacagattctatttcctgagaaaagtgaaga |
| | | | | tttcagagagaatatattccaatatgatgatgaagggggtgga |
| | | | | gaagaagatacagaggcctttgatatagcagagctgaggagta |
| | | | | gtaccataatgcgggaacgcaagactcggaaaaccacaagcgc |
| | | | | tgagatcaggagcctatacaggcagtctttgcaagttggcccc |
| | | | | gacagtgccatattcaggaaattcattctggaaaagctcgaag |
| | | | | aagctaatactgatccgtgtgcccctccttttgattccctcca |
| | | | | gacctacgcttttgagggaacagggtcattagctggatccctg |
| | | | | agctccttagaatcagcagtctctgatcaggatgaaagctatg |
| | | | | attaccttaatgagttgggacctcgctttaaaagattagcatg |
| | | | | catgtttggttctgcagtgcagtcaaataattag |
| 964 | C137915 | artificial | aa | AWVWRPFVVLEEMDDIQCVGKLRSDLDNGNNSFQYKLLGIGAG |
| | muCDH19 | | | SFSINERTGEICAIQKLDREEKSLYILRAQVIDTTIGKAVETE |
| | (44-461) | | | SEEVIRVLDINDNEPRELDEPYEAIVPEMSPEGTEVIKVTAND |
| | huCDH19 | | | ADDPSTGYHARILYNLERGQPYFSVEPTTGVIRISSKMDRELQ |
| | (464-772) | | | DTYCVIIQAKDMLGQPGALSGTTTVSIKLSDINDNKPIFKESF |
| | | | | YRFTISESAPIGTSIGKIMAYDDDIGENAEMEYSIEDDDSKIF |
| | | | | DIIIDNDTQEGIVILKKKVDFEQQSYYGIRAKVKNCHVDEELA |
| | | | | PAHVNASTTYIKVQVEDEDEPPVFLLPYYILEIPEGKPYGTIV |
| | | | | GTVSATDPDRRQSPMRYYLTGSKMFDINDNGTIITTNMLDREV |
| | | | | SAWYNLTVTATETYNVQQISSAHVYVQVFNINDHAPEFSQYYE |
| | | | | TYVCENAGSGQVIQTISAVDRDESIEEHHFYFNLSVEDTNNSS |
| | | | | FTIIDNQDNTAVILTNRTGFNLQEEPVFYISILIADNGIPSLT |
| | | | | STNTLTIHVCDCGDSGSTQTCQYQELVLSMGFKTEVIIAILIC |
| | | | | IMIIFGFIFLTLGLKQRRKQILFPEKSEDFRENIFQYDDEGGG |
| | | | | EEDTEAFDIAELRSSTIMRERKTRKTTSAEIRSLYRQSLQVGP |
| | | | | DSAIFRKFILEKLEEANTDPCAPPFDSLQTYAFEGTGSLAGSL |
| | | | | SSLESAVSDQDESYDYLNELGPRFKRLACMFGSAVQSNN |
| 965 | C137915 | artificial | nt | gcctgggtgtggagaccatttgttgttctagaagaaatggatg |
| | muCDH19 | | | atatacaatgtgttggaaagctaagatctgacttagacaatgg |
| | (44-461) | | | aaacaactctttccagtacaagctactggggattggcgctgga |
| | huCDH19 | | | agctttagcattaatgaaagaacaggtgaaatatgtgccatac |
| | (464-772) | | | agaagcttgatagagaggaaaaatccctctacattctgagagc |
| | | | | ccaggtaatagacaccactattgggaaggctgtggaaactgaa |
| | | | | tccgagtttgtcatcagagttttggatatcaatgacaatgaac |
| | | | | ccagattcctagatgaaccatatgaggccattgtacctgagat |
| | | | | gtctccagaaggaacatttgtcatcaaggtgacagccaatgac |
| | | | | gcagatgatccttcaactggctatcatgctcgcatcctataca |
| | | | | acttagaacgaggtcaaccatacttttctgttgagccaacaac |
| | | | | aggagtcataaggatatcttctaagatggatagagagttgcaa |
| | | | | gatacatactgtgtaattattcaagccaaggacatgctcggtc |
| | | | | agcctggagccttgtctggaacaacaaccgtatcaattaagct |
| | | | | gtcagatattaatgacaacaagccaatattcaaagaaagtttc |
| | | | | taccgcttcactatatctgaatctgcacccattggaacatcaa |
| | | | | tagggaaaattatggcatatgatgatgacataggggagaatgc |
| | | | | agagatggagtacagcattgaagatgatgattcaaaaatattt |
| | | | | gacataatcattgacaatgacacccaagaagggatagttatac |
| | | | | ttaaaaagaaagttgattttgagcagcagagctattatggcat |
| | | | | tagagctaaggttaaaaactgccatgtggatgaagagcttgca |
| | | | | cctgcccatgttaacgcttccacaacctacattaaagttcaag |
| | | | | tagaagatgaagatgaacctcctgttttcctcttaccatatta |
| | | | | catacttgaaattcctgaaggaaaaccatatggaacaattgtg |
| | | | | gggacggtttctgccacagacccagatcgaagacaatctccta |
| | | | | tgagatattatctcactggaagcaaaatgtttgatatcaatga |
| | | | | caatggaacaataatcaccactaacatgcttgacagagaggtc |
| | | | | agtgcttggtacaacttgactgtcacagctactgaaacataca |
| | | | | atgtacaacagatctcttcagcccatgtttatgtacaagtctt |
| | | | | taacattaatgatcatgctcctgagttctctcaatactatgag |
| | | | | acttatgtttgtgaaaatgcaggctctggtcaggtaattcaga |
| | | | | ctatcagtgcagtggatagagatgaatccatagaagagcacca |
| | | | | tttttactttaatctatctgtagaagacactaacaattcaagt |
| | | | | tttacaatcatagataatcaagataacacagctgtcattttga |
| | | | | ctaatagaactggttttaaccttcaagaagaacctgtcttcta |
| | | | | catctccatcttaattgccgacaatggaatcccgtcacttaca |
| | | | | agtacaaacacccttaccatccatgtctgtgactgtggtgaca |
| | | | | gtgggagcacacagacctgccagtaccaggagcttgtgctttc |
| | | | | catgggattcaagacagaagtcatcattgctattctcatttgc |
| | | | | attatgatcatatttgggtttatttttttgactttgggtttaa |
| | | | | aacaacggagaaaacagattctatttcctgagaaaagtgaaga |
| | | | | tttcagagagaatatattccaatatgatgatgaagggggtgga |
| | | | | gaagaagatacagaggcctttgatatagcagagctgaggagta |
| | | | | gtaccataatgcgggaacgcaagactcggaaaaccacaagcgc |
| | | | | tgagatcaggagcctatacaggcagtctttgcaagttggcccc |
| | | | | gacagtgccatattcaggaaattcattctggaaaagctcgaag |
| | | | | aagctaatactgatccgtgtgcccctccttttgattccctcca |
| | | | | gacctacgcttttgagggaacagggtcattagctggatccctg |
| | | | | agctccttagaatcagcagtctctgatcaggatgaaagctatg |
| | | | | attaccttaatgagttgggacctcgctttaaaagattagcatg |
| | | | | catgtttggttctgcagtgcagtcaaataattag |
| 966 | C71144 | artificial | aa | AWVWRPFVVLEEMDDIQCVGKLRSDLDNGNNSFQYKLLGIGAG |
| | muCDH19 | | | SFSINERTGEICAIQKLDREEKSLYILRAQVIDTTIGKAVETE |
| | (44-770) | | | SEEVIRVLDINDNEPRELDEPYEAIVPEMSPEGTEVIKVTAND |
| | | | | ADDPSTGYHARILYNLERGQPYFSVEPTTGVIRISSKMDRELQ |
| | | | | DTYCVIIQAKDMLGQPGALSGTTTVSIKLSDINDNKPIFKESF |
| | | | | YRFTISESAPIGTSIGKIMAYDDDIGENAEMEYSIEDDDSKIF |
| | | | | DIIIDNDTQEGIVILKKKVDFEQQSYYGIRAKVKNCHVDEELA |
| | | | | PAHVNASTTYIKVQVEDEDEPPVFLLPYYILEIPEGKPYGTIV |
| | | | | GTVSATDPDRRQSPMRYYLTGSKMFDINDNGTIITTNMLDREV |
| | | | | SAWYNLTVTATETYNVQQISSAHVYVQVFNINDNAPEFSQFYE |
| | | | | TYVCENAESGEIVQIISAIDRDESIEDHHEYENHSLEDTNNSS |
| | | | | FMLTDNQDNTAVILSNRTGENLKEEPVEYMIILIADNGIPSLT |
| | | | | STNTLTIQVCDCGDSRNTETCANKGLLFIMGFRTEAIIAIMIC |
| | | | | VMVIFGEFFLILALKQRRKETLFPEKTEDFRENIFCYDDEGGG |
| | | | | EEDSEAFDIVELRQSTVMRERKPQRSKSAEIRSLYRQSLQVGP |
| | | | | DSAIFRKFILEKLEEANTDPCAPPFDSLQTFAYEGTGSSAGSL |
| | | | | SSLASRDTDQEDDFDYLNDLGPRFKRLASMFGSAVQPNN |
| 967 | C71144 | artificial | nt | gcctgggtgtggagaccatttgttgttctagaagaaatggatg |
| | muCDH19 | | | atatacaatgtgttggaaagctaagatctgacttagacaatgg |
| | (44-770) | | | aaacaactctttccagtacaagctactggggattggcgctgga |
| | | | | agctttagcattaatgaaagaacaggtgaaatatgtgccatac |
| | | | | agaagcttgatagagaggaaaaatccctctacattctgagagc |
| | | | | ccaggtaatagacaccactattgggaaggctgtggaaactgaa |
| | | | | tccgagtttgtcatcagagttttggatatcaatgacaatgaac |
| | | | | ccagattcctagatgaaccatatgaggccattgtacctgagat |
| | | | | gtctccagaaggaacatttgtcatcaaggtgacagccaatgac |
| | | | | gcagatgatccttcaactggctatcatgctcgcatcctataca |
| | | | | acttagaacgaggtcaaccatacttttctgttgagccaacaac |
| | | | | aggagtcataaggatatcttctaagatggatagagagttgcaa |
| | | | | gatacatactgtgtaattattcaagccaaggacatgctcggtc |
| | | | | agcctggagccttgtctggaacaacaaccgtatcaattaagct |
| | | | | gtcagatattaatgacaacaagccaatattcaaagaaagtttc |
| | | | | taccgcttcactatatctgaatctgcacccattggaacatcaa |
| | | | | tagggaaaattatggcatatgatgatgacataggggagaatgc |
| | | | | agagatggagtacagcattgaagatgatgattcaaaaatattt |
| | | | | gacataatcattgacaatgacacccaagaagggatagttatac |
| | | | | ttaaaaagaaagttgattttgagcagcagagctattatggcat |
| | | | | tagagctaaggttaaaaactgccatgtggatgaagagcttgca |
| | | | | cctgcccatgttaacgcttccacaacctacattaaagttcaag |
| | | | | tagaagatgaagatgaacctcctgttttcctcttaccatatta |
| | | | | catacttgaaattcctgaaggaaaaccatatggaacaattgtg |
| | | | | gggacggtttctgccacagacccagatcgaagacaatctccta |
| | | | | tgagatattatctcactggaagcaaaatgtttgatatcaatga |
| | | | | caatggaacaataatcaccactaacatgcttgacagagaggtc |
| | | | | agtgcttggtacaacttgactgtcacagctactgaaacataca |
| | | | | atgtacaacagatctcttcagcccatgtttatgtacaagtctt |
| | | | | taacattaacgacaatgctccagagttctctcaattctatgag |
| | | | | acttatgtttgtgaaaatgctgaatctggtgagatagttcaga |
| | | | | tcatcagtgcaattgatagagatgagtccatagaagatcacca |
| | | | | tttttactttaatcactctctggaagacacaaacaactcaagt |
| | | | | tttatgctaacagacaatcaagataacacagctgtaattctga |
| | | | | gtaatagaactggtttcaatcttaaagaagagcctgtcttcta |
| | | | | catgatcatcttgattgctgataacgggatcccatctctcaca |
| | | | | agcacaaacactctcactatccaagtctgtgactgtggagaca |
| | | | | gtagaaacacagaaacttgtgctaacaagggacttctctttat |
| | | | | catgggattcagaacagaggcaataattgccatcatgatatgt |
| | | | | gttatggtaatatttgggtttttctttttgattcttgctctga |
| | | | | aacagcgaagaaaggagactctatttccagagaagactgaaga |
| | | | | ctttagggagaatatattttgctatgatgatgaaggcggcggg |
| | | | | gaagaagactcggaagcctttgacatcgtagagctgagacaaa |
| | | | | gtacagtaatgagagaaagaaagcctcagagaagcaagagtgc |
| | | | | ggagatcaggagcttgtacaggcagtccctgcaggtgggccca |
| | | | | gacagtgccatatttcgaaaatttatcctagagaagcttgaag |
| | | | | aagccaacacagacccatgtgctcccccctttgattcactaca |
| | | | | gacgtttgcctatgagggaacagggtcatcagctggctctctg |
| | | | | agctccttggcatccagagacactgatcaggaggatgacttcg |
| | | | | actaccttaatgacctgggacctcgttttaaaagattagcaag |
| | | | | catgtttggctctgcagtacaacccaacaattag |
| 968 | Flag Tag | artificial | aa | DYKDDDDK |
| 969 | Flag Tag | artificial | nt | gactacaaagacgatgacgacaag |

[0495] Bispecific Binding Molecules

TABLE VI

| SEQ | | | | |
|---|---|---|---|---|
| ID | | | | |
| NO. | DESIGNATION | SOURCE | TYPE | SEQUENCE |
| 970 | CDR-H1 of | artificial | AA | SYGMH |
| | CDH19 2G6 | | | |
| 971 | CDR-H2 of | artificial | AA | FIWYDGSNKYYADSVKD |
| | CDH19 2G6 | | | |
| 972 | CDR-H3 of | artificial | AA | RAGIIGTIGYYYGMDV |
| | CDH19 2G6 | | | |
| 973 | CDR-L1 of | artificial | AA | SGDRLGEKYTC |
| | CDH19 2G6 | | | |
| 974 | CDR-L2 of | artificial | AA | QDTKRPS |
| | CDH19 2G6 | | | |
| 975 | CDR-L3 of | artificial | AA | QAWDSSTVV |
| | CDH19 2G6 | | | |
| 976 | VH of CDH19 | artificial | NT | CAGGTGCAGCTGGTGGAATCCGGCGGAGGCGTGGTGCAGCCTG |
| | 2G6 | | | GCCGGTCCCTGAGACTGTCTTGCGCCGCCTCCGGCTTCACCTT |
| | | | | CTCCAGCTACGGCATGCACTGGGTCCGACAGGCCCCTGGCAAG |
| | | | | GGCCTGGAATGGGTGGCCTTCATTTGGTACGACGGCTCCAACA |
| | | | | AGTACTACGCCGACTCCGTGAAGGACCGGTTCACCATCTCCCG |
| | | | | GGACAACTCCAAGAACACCCTGTACCTGCAGATGAAGTCCCTG |
| | | | | CGGGCCGAGGACACCGCCGTGTACTACTGTGCCAGAAGGGCCG |
| | | | | GCATCATCGGCACCATCGGCTACTACTACGGCATGGACGTGTG |
| | | | | GGGCCAGGGCACCACCGTGACCGTGTCTAGC |
| 977 | VH of CDH19 | artificial | AA | QVQLVESGGGVVQPGRSLRLSCAASGFTFSSYGMHWVRQAPGK |
| | 2G6 | | | GLEWVAFIWYDGSNKYYADSVKDRFTISRDNSKNTLYLQMKSL |
| | | | | RAEDTAVYYCARRAGIIGTIGYYYGMDVWGQGTTVTVSS |
| 978 | VL of CDH19 | artificial | NT | TACGAGCTGACCCAGCCCCCCTCCGTGTCCGTGTCTCCTGGCC |
| | 2G6 | | | AGACCGCCTCCATCACCTGTTCTGGCGACCGGCTGGGCGAGAA |
| | | | | GTACACCTGTTGGTATCAGCAGCGGCCTGGCCAGTCCCCCCTG |
| | | | | CTGGTCATCTACCAGGACACCAAGCGGCCCTCCGGCATCCCTG |
| | | | | AGCGGTTCTCCGGCTCCAACTCCGGCAACACCGCCACCCTGAC |
| | | | | CATCTCCGGCACCCAGGCCATGGACGAGGCCGACTACTACTGC |
| | | | | CAGGCCTGGGACTCCTCCACCGTGGTGTTCGGCGGAGGCACCA |
| | | | | AGCTGACCGTGCTG |
| 979 | VL of CDH19 | artificial | AA | SYELTQPPSVSVSPGQTASITCSGDRLGEKYTCWYQQRPGQSP |
| | 2G6 | | | LLVIYQDTKRPSGIPERFSGSNSGNTATLTISGTQAMDEADYY |
| | | | | CQAWDSSTVVFGGGTKLTVL |
| 980 | VH-VL of | artificial | NT | CAGGTGCAGCTGGTGGAATCCGGCGGAGGCGTGGTGCAGCCTG |
| | CDH19 2G6 | | | GCCGGTCCCTGAGACTGTCTTGCGCCGCCTCCGGCTTCACCTT |
| | | | | CTCCAGCTACGGCATGCACTGGGTCCGACAGGCCCCTGGCAAG |
| | | | | GGCCTGGAATGGGTGGCCTTCATTTGGTACGACGGCTCCAACA |
| | | | | AGTACTACGCCGACTCCGTGAAGGACCGGTTCACCATCTCCCG |
| | | | | GGACAACTCCAAGAACACCCTGTACCTGCAGATGAAGTCCCTG |
| | | | | CGGGCCGAGGACACCGCCGTGTACTACTGTGCCAGAAGGGCCG |
| | | | | GCATCATCGGCACCATCGGCTACTACTACGGCATGGACGTGTG |
| | | | | GGGCCAGGGCACCACCGTGACCGTGTCTAGCGGAGGCGGAGGA |
| | | | | TCTGGTGGCGGTGGTTCTGGCGGCGGAGGCTCCTCTTACGAGC |
| | | | | TGACCCAGCCCCCCTCCGTGTCCGTGTCTCCTGGCCAGACCGC |
| | | | | CTCCATCACCTGTTCTGGCGACCGGCTGGGCGAGAAGTACACC |
| | | | | TGTTGGTATCAGCAGCGGCCTGGCCAGTCCCCCCTGCTGGTCA |
| | | | | TCTACCAGGACACCAAGCGGCCCTCCGGCATCCCTGAGCGGTT |
| | | | | CTCCGGCTCCAACTCCGGCAACACCGCCACCCTGACCATCTCC |
| | | | | GGCACCCAGGCCATGGACGAGGCCGACTACTACTGCCAGGCCT |
| | | | | GGGACTCCTCCACCGTGGTGTTCGGCGGAGGCACCAAGCTGAC |
| | | | | CGTGCTG |
| 981 | VH-VL of | artificial | AA | QVQLVESGGGVVQPGRSLRLSCAASGFTFSSYGMHWVRQAPGK |
| | CDH19 2G6 | | | GLEWVAFIWYDGSNKYYADSVKDRFTISRDNSKNTLYLQMKSL |
| | | | | RAEDTAVYYCARRAGIIGTIGYYYGMDVWGQGTTVTVSSGGGG |
| | | | | SGGGGSGGGGSSYELTQPPSVSVSPGQTASITCSGDRLGEKYT |
| | | | | CWYQQRPGQSPLLVIYQDTKRPSGIPERFSGSNSGNTATLTIS |
| | | | | GTQAMDEADYYCQAWDSSTVVFGGGTKLTVL |
| 982 | CDH19 2G6 x | artificial | | QVQLVESGGGVVQPGRSLRLSCAASGFTFSSYGMHWVRQAPGK |
| | I2C | | | GLEWVAFIWYDGSNKYYADSVKDRFTISRDNSKNTLYLQMKSL |
| | | | | RAEDTAVYYCARRAGIIGTIGYYYGMDVWGQGTTVTVSSGGGG |
| | | | | SGGGGSGGGGSSYELTQPPSVSVSPGQTASITCSGDRLGEKYT |
| | | | | CWYQQRPGQSPLLVIYQDTKRPSGIPERFSGSNSGNTATLTIS |
| | | | | GTQAMDEADYYCQAWDSSTVVFGGGTKLTVLSGGGGSEVQLVE |
| | | | | SGGGLVQPGGSLKLSCAASGFTFNKYAMNWVRQAPGKGLEWVA |
| | | | | RIRSKYNNYATYYADSVKDRFTISRDDSKNTAYLQMNNLKTED |
| | | | | TAVYYCVRHGNFGNSYISYWAYWGQGTLVTVSSGGGGSGGGGS |
| | | | | GGGGSQTVVTQEPSLTVSPGGTVTLTCGSSTGAVTSGNYPNWV |
| | | | | QQKPGQAPRGLIGGTKFLAPGTPARFSGSLLGGKAALTLSGVQ |
| | | | | PEDEAEYYCVLWYSNRWVFGGGTKLTVLHHHHHH |
| 983 | CDR-H1 of | artificial | AA | SYGMH |
| | CDH19 16E2.1 | | | |
| 984 | CDR-H2 of | artificial | AA | VIWYDGSNKYYADSVKG |
| | CDH19 16E2.1 | | | |
| 985 | CDR-H3 of | artificial | AA | DGWELSFDY |
| | CDH19 16E2.1 | | | |
| 986 | CDR-L1 of | artificial | AA | RASQGISNYLA |
| | CDH19 16E2.1 | | | |
| 987 | CDR-L2 of | artificial | AA | AASSLQS |
| | CDH19 16E2.1 | | | |
| 988 | CDR-L3 of | artificial | AA | QHYFTYPRT |
| | CDH19 16E2.1 | | | |
| 989 | VH of CDH19 | artificial | NT | CAGGTGCAGCTGGTGGAATCCGGCGGAGGCGTGGTGCAGCCTG |
| | 16E2.1 | | | GCCGGTCCCTGAGACTGTCTTGCGCCGCCTCCGGCTTCATCTT |
| | | | | CTCCAGCTACGGCATGCACTGGGTCCGACAGACCCCCGGCAAG |
| | | | | GGCCTGGAATGGGTGGCCGTGATTTGGTACGACGGCTCCAACA |
| | | | | AGTACTACGCCGACTCCGTGAAGGGCCGGTTCACCATCTCCCG |
| | | | | GGACATCTCCAAGAACACCCTGTACCTGCAGATGAACTCCCTG |
| | | | | CGGGTGGAAGATACCGCCGTGTACTACTGCGCCAGGGACGGCT |
| | | | | GGGAGCTGTCCTTCGATTACTGGGGCCAGGGCACCCTGGTCAC |
| | | | | CGTGTCTAGC |
| 990 | VH of CDH19 | artificial | AA | QVQLVESGGGVVQPGRSLRLSCAASGFIFSSYGMHWVRQTPGK |
| | 16E2.1 | | | GLEWVAVIWYDGSNKYYADSVKGRFTISRDISKNTLYLQMNSL |
| | | | | RVEDTAVYYCARDGWELSFDYWGQGTLVTVSS |
| 991 | VL of CDH19 | artificial | NT | GACATCCAGATGACCCAGTCCCCCTCCAGCCTGTCCGCCTCCG |
| | 16E2.1 | | | TGGGCGACAGAGTGACCATCACCTGTCGGGCCTCCCAGGGCAT |
| | | | | CAGCAACTACCTGGCCTGGCTGCAGCAGAAGCCCGGCAAGGCC |
| | | | | CCCAAGTCCCTGATCTACGCCGCCAGCTCCCTGCAGTCCGGCG |
| | | | | TGCCCTCCAAGTTCTCCGGCTCTGGCTCCGGCACCGACTTCAC |
| | | | | CCTGACCATCTCCAGCCTGCAGCCCGAGGACTTCGCCACCTAC |
| | | | | TACTGCCAGCACTACTTCACCTACCCCCGGACCTTCGGACAGG |
| | | | | GCACCAAGGTGGAAATCAAG |
| 992 | VL of CDH19 | artificial | AA | DIQMTQSPSSLSASVGDRVTITCRASQGISNYLAWLQQKPGKA |
| | 16E2.1 | | | PKSLIYAASSLQSGVPSKFSGSGSGTDFTLTISSLQPEDFATY |
| | | | | YCQHYFTYPRTFGQGTKVEIK |
| 993 | VH-VL of | artificial | NT | CAGGTGCAGCTGGTGGAATCCGGCGGAGGCGTGGTGCAGCCTG |
| | CDH19 16E2.1 | | | GCCGGTCCCTGAGACTGTCTTGCGCCGCCTCCGGCTTCATCTT |
| | | | | CTCCAGCTACGGCATGCACTGGGTCCGACAGACCCCCGGCAAG |
| | | | | GGCCTGGAATGGGTGGCCGTGATTTGGTACGACGGCTCCAACA |
| | | | | AGTACTACGCCGACTCCGTGAAGGGCCGGTTCACCATCTCCCG |
| | | | | GGACATCTCCAAGAACACCCTGTACCTGCAGATGAACTCCCTG |
| | | | | CGGGTGGAAGATACCGCCGTGTACTACTGCGCCAGGGACGGCT |
| | | | | GGGAGCTGTCCTTCGATTACTGGGGCCAGGGCACCCTGGTCAC |
| | | | | CGTGTCTAGCGGAGGCGGAGGATCTGGTGGCGGTGGTTCTGGC |
| | | | | GGCGGAGGCTCCGACATCCAGATGACCCAGTCCCCCTCCAGCC |
| | | | | TGTCCGCCTCCGTGGGCGACAGAGTGACCATCACCTGTCGGGC |
| | | | | CTCCCAGGGCATCAGCAACTACCTGGCCTGGCTGCAGCAGAAG |
| | | | | CCCGGCAAGGCCCCCAAGTCCCTGATCTACGCCGCCAGCTCCC |
| | | | | TGCAGTCCGGCGTGCCCTCCAAGTTCTCCGGCTCTGGCTCCGG |
| | | | | CACCGACTTCACCCTGACCATCTCCAGCCTGCAGCCCGAGGAC |
| | | | | TTCGCCACCTACTACTGCCAGCACTACTTCACCTACCCCCGGA |
| | | | | CCTTCGGACAGGGCACCAAGGTGGAAATCAAG |
| 994 | VH-VL of | artificial | AA | QVQLVESGGGVVQPGRSLRLSCAASGFIFSSYGMHWVRQTPGK |
| | CDH19 16E2.1 | | | GLEWVAVIWYDGSNKYYADSVKGRFTISRDISKNTLYLQMNSL |
| | | | | RVEDTAVYYCARDGWELSFDYWGQGTLVTVSSGGGGSGGGGSG |
| | | | | GGGSDIQMTQSPSSLSASVGDRVTITCRASQGISNYLAWLQQK |
| | | | | PGKAPKSLIYAASSLQSGVPSKFSGSGSGTDFTLTISSLQPED |
| | | | | FATYYCQHYFTYPRTFGQGTKVEIK |
| 995 | CDH19 16E2.1 | artificial | | QVQLVESGGGVVQPGRSLRLSCAASGFIFSSYGMHWVRQTPGK |
| | x I2C | | | GLEWVAVIWYDGSNKYYADSVKGRFTISRDISKNTLYLQMNSL |
| | | | | RVEDTAVYYCARDGWELSFDYWGQGTLVTVSSGGGGSGGGGSG |
| | | | | GGGSDIQMTQSPSSLSASVGDRVTITCRASQGISNYLAWLQQK |
| | | | | PGKAPKSLIYAASSLQSGVPSKFSGSGSGTDFTLTISSLQPED |
| | | | | FATYYCQHYFTYPRTFGQGTKVEIKSGGGGSEVQLVESGGGLV |
| | | | | QPGGSLKLSCAASGFTFNKYAMNWVRQAPGKGLEWVARIRSKY |
| | | | | NNYATYYADSVKDRFTISRDDSKNTAYLQMNNLKTEDTAVYYC |
| | | | | VRHGNFGNSYISYWAYWGQGTLVTVSSGGGGSGGGGSGGGGSQ |
| | | | | TVVTQEPSLTVSPGGTVTLTCGSSTGAVTSGNYPNWVQQKPGQ |
| | | | | APRGLIGGTKFLAPGTPARFSGSLLGGKAALTLSGVQPEDEAE |
| | | | | YYCVLWYSNRWVFGGGTKLTVLHHHHHH |
| 996 | CDR-H1 of | artificial | AA | SYYWS |
| | CDH19 17H8.2 | | | |
| 997 | CDR-H2 of | artificial | AA | YIYYIGSTNYNPSLKS |
| | CDH19 17H8.2 | | | |
| 998 | CDR-H3 of | artificial | AA | DSRYRSGWYDAFDI |
| | CDH19 17H8.2 | | | |
| 999 | CDR-L1 of | artificial | AA | RASQSVAGSYLA |
| | CDH19 17H8.2 | | | |
| 1000 | CDR-L2 of | artificial | AA | GASSRAT |
| | CDH19 17H8.2 | | | |
| 1001 | CDR-L3 of | artificial | AA | QQYGKSPIT |
| | CDH19 17H8.2 | | | |
| 1002 | VH of CDH19 | artificial | NT | CAGGTGCAGCTGCAGGAATCCGGCCCTGGCCTGGTCAAGCCCT |
| | 17H8.2 | | | CCGAGACACTGTCCCTGACCTGCACCGTGTCCGGCGGCTCCAT |
| | | | | CAACTCCTACTACTGGTCCTGGATCCGGCAGCCCCCTGGCAAG |
| | | | | GGCCTGGAATGGATCGGCTACATCTACTACATCGGCTCCACCA |
| | | | | ACTACAACCCCAGCCTGAAGTCCAGAGTGACCATCTCCGTGGA |
| | | | | CACCTCCAAGAACCAGTTCTCCCTGAAGCTGTCCTCCGTGACC |
| | | | | GCCGCTGACACCGCCCTGTACTACTGCGCCAGAGACTCCCGGT |
| | | | | ACAGATCCGGGTGGTACGACGCCTTCGACATCTGGGGCCAGGG |
| | | | | CACCATGGTCACCGTGTCCTCT |
| 1003 | VH of CDH19 | artificial | AA | QVQLQESGPGLVKPSETLSLTCTVSGGSINSYYWSWIRQPPGK |
| | 17H8.2 | | | GLEWIGYIYYIGSTNYNPSLKSRVTISVDTSKNQFSLKLSSVT |
| | | | | AADTALYYCARDSRYRSGWYDAFDIWGQGTMVTVSS |
| 1004 | VL of CDH19 | artificial | NT | GATATCGTGCTGACCCAGTCCCCCGGCACCCTGTCTCTGAGCC |
| | 17H8.2 | | | CTGGCGAGAGAGCCACCCTGTCCTGCAGAGCCTCTCAGTCCGT |
| | | | | GGCCGGCTCCTACCTGGCTTGGTATCAGCAGAAGCCCGGCCAG |
| | | | | GCCCCTCGGCTGCTGATCTCCGGCGCCTCTTCTAGAGCCACCG |
| | | | | GCATCCCTGACCGGTTCTCCGGCTCTGGCTCCGGCACCGACTT |
| | | | | CACCCTGACCATCAGCCGGCTGGAACCCGAGGACTTCGCCGTG |
| | | | | TACTATTGCCAGCAGTACGGCAAGTCCCCCATCACCTTCGGCC |
| | | | | AGGGAACCCGGCTGGAAATGAAG |
| 1005 | VL of CDH19 | artificial | AA | DIVLTQSPGTLSLSPGERATLSCRASQSVAGSYLAWYQQKPGQ |
| | 17H8.2 | | | APRLLISGASSRATGIPDRFSGSGSGTDFTLTISRLEPEDFAV |
| | | | | YYCQQYGKSPITFGQGTRLEMK |
| 1006 | VH-VL of | artificial | NT | CAGGTGCAGCTGCAGGAATCCGGCCCTGGCCTGGTCAAGCCCT |
| | CDH19 17H8.2 | | | CCGAGACACTGTCCCTGACCTGCACCGTGTCCGGCGGCTCCAT |
| | | | | CAACTCCTACTACTGGTCCTGGATCCGGCAGCCCCCTGGCAAG |
| | | | | GGCCTGGAATGGATCGGCTACATCTACTACATCGGCTCCACCA |
| | | | | ACTACAACCCCAGCCTGAAGTCCAGAGTGACCATCTCCGTGGA |
| | | | | CACCTCCAAGAACCAGTTCTCCCTGAAGCTGTCCTCCGTGACC |
| | | | | GCCGCTGACACCGCCCTGTACTACTGCGCCAGAGACTCCCGGT |
| | | | | ACAGATCCGGGTGGTACGACGCCTTCGACATCTGGGGCCAGGG |
| | | | | CACCATGGTCACCGTGTCCTCTGGTGGCGGAGGCTCTGGCGGA |
| | | | | GGTGGAAGCGGAGGCGGCGGATCCGATATCGTGCTGACCCAGT |
| | | | | CCCCCGGCACCCTGTCTCTGAGCCCTGGCGAGAGAGCCACCCT |
| | | | | GTCCTGCAGAGCCTCTCAGTCCGTGGCCGGCTCCTACCTGGCT |
| | | | | TGGTATCAGCAGAAGCCCGGCCAGGCCCCTCGGCTGCTGATCT |
| | | | | CCGGCGCCTCTTCTAGAGCCACCGGCATCCCTGACCGGTTCTC |
| | | | | CGGCTCTGGCTCCGGCACCGACTTCACCCTGACCATCAGCCGG |
| | | | | CTGGAACCCGAGGACTTCGCCGTGTACTATTGCCAGCAGTACG |
| | | | | GCAAGTCCCCCATCACCTTCGGCCAGGGAACCCGGCTGGAAAT |
| | | | | GAAG |
| 1007 | VH-VL of | artificial | AA | QVQLQESGPGLVKPSETLSLTCTVSGGSINSYYWSWIRQPPGK |
| | CDH19 17H8.2 | | | GLEWIGYIYYIGSTNYNPSLKSRVTISVDTSKNQFSLKLSSVT |
| | | | | AADTALYYCARDSRYRSGWYDAFDIWGQGTMVTVSSGGGGSGG |
| | | | | GGSGGGGSDIVLTQSPGTLSLSPGERATLSCRASQSVAGSYLA |
| | | | | WYQQKPGQAPRLLISGASSRATGIPDRFSGSGSGTDFTLTISR |
| | | | | LEPEDFAVYYCQQYGKSPITFGQGTRLEMK |
| 1008 | CDH19 17H8.2 | artificial | | QVQLQESGPGLVKPSETLSLTCTVSGGSINSYYWSWIRQPPGK |
| | x I2C | | | GLEWIGYIYYIGSTNYNPSLKSRVTISVDTSKNQFSLKLSSVT |
| | | | | AADTALYYCARDSRYRSGWYDAFDIWGQGTMVTVSSGGGGSGG |
| | | | | GGSGGGGSDIVLTQSPGTLSLSPGERATLSCRASQSVAGSYLA |
| | | | | WYQQKPGQAPRLLISGASSRATGIPDRFSGSGSGTDFTLTISR |
| | | | | LEPEDFAVYYCQQYGKSPITFGQGTRLEMKSGGGGSEVQLVES |
| | | | | GGGLVQPGGSLKLSCAASGFTENKYAMNWVRQAPGKGLEWVAR |
| | | | | IRSKYNNYATYYADSVKDRFTISRDDSKNTAYLQMNNLKTEDT |
| | | | | AVYYCVRHGNFGNSYISYWAYWGQGTLVTVSSGGGGSGGGGSG |
| | | | | GGGSQTVVTQEPSLTVSPGGTVTLTCGSSTGAVTSGNYPNWVQ |
| | | | | QKPGQAPRGLIGGTKFLAPGTPARFSGSLLGGKAALTLSGVQP |
| | | | | EDEAEYYCVLWYSNRWVFGGGTKLTVLHHHHHH |
| 1009 | CDR-H1 of | artificial | AA | SYFIH |
| | CDH19 19B5.1 | | | |
| 1010 | CDR-H2 of | artificial | AA | IINPISVSTSYAQKFQG |
| | CDH19 19B5.1 | | | |
| 1011 | CDR-H3 of | artificial | AA | GGIQLWLHLDY |
| | CDH19 19B5.1 | | | |
| 1012 | CDR-L1 of | artificial | AA | SGSRSNIGSNFVN |
| | CDH19 19B5.1 | | | |
| 1013 | CDR-L2 of | artificial | AA | TNNQRPS |
| | CDH19 19B5.1 | | | |
| 1014 | CDR-L3 of | artificial | AA | ATWDDSMNGWV |
| | CDH19 19B5.1 | | | |
| 1015 | VH of CDH19 | artificial | NT | CAGGTGCAGCTGGTGCAGTCTGGCGCCGAAGTGAAGAAACCTG |
| | 19B5.1 | | | GCGCCTCCGTGAAGGTGTCCTGCAAGGTGTCCGGCTACACCTT |
| | | | | CACCAGCTACTTCATCCACTGGGTCCGACAGGCCCCAGGCCAG |
| | | | | GGCCTGGAATGGATGGGCATCATCAACCCTATCTCCGTGTCCA |
| | | | | CCTCCTACGCCCAGAAATTCCAGGGCAGAGTGACCATGACCCG |
| | | | | GGACACCTCCACCTCCACCGTGTTCATGGAACTGTCCTCCCTG |
| | | | | CGGAGCGAGGACACCGCCGTGTACTACTGCGCCAGAGGCGGCA |
| | | | | TCCAGCTGTGGCTGCACCTGGACTATTGGGGCCAGGGCACCCT |
| | | | | GGTCACCGTGTCCTCT |
| 1016 | VH of CDH19 | artificial | AA | QVQLVQSGAEVKKPGASVKVSCKVSGYTFTSYFIHWVRQAPGQ |
| | 19B5.1 | | | GLEWMGIINPISVSTSYAQKFQGRVTMTRDTSTSTVFMELSSL |
| | | | | RSEDTAVYYCARGGIQLWLHLDYWGQGTLVTVSS |
| 1017 | VL of CDH19 | artificial | NT | CAGTCTGCCCTGACCCAGCCTCCCTCCACCACCGGCACACCTG |
| | 19B5.1 | | | GCCAGCGCGTGACCATCTCCTGCTCCGGCTCCCGGTCCAACAT |
| | | | | CGGCTCCAACTTCGTGAACTGGTACAAGCAGCTGCCCGGCACC |
| | | | | GCCCCCAAGGTGCTGATCTACACCAACAACCAGCGGCCCTCCG |
| | | | | GCGTGCCCGACCGGTTCTCTGGCTCCAAGTCTGGCACCTCCGC |
| | | | | CTCCCTGGCCATCTCCGGCCTGCAGTCCGAGGACGAGTCCGAC |
| | | | | TACTACTGTGCCACCTGGGACGACTCCATGAACGGCTGGGTGT |
| | | | | TCGGCGGAGGCACCAAGCTGACCGTGCTG |
| 1018 | VL of CDH19 | artificial | AA | QSALTQPPSTTGTPGQRVTISCSGSRSNIGSNFVNWYKQLPGT |
| | 19B5.1 | | | APKVLIYTNNQRPSGVPDRFSGSKSGTSASLAISGLQSEDESD |
| | | | | YYCATWDDSMNGWVFGGGTKLTVL |
| 1019 | VH-VL of | artificial | NT | CAGGTGCAGCTGGTGCAGTCTGGCGCCGAAGTGAAGAAACCTG |
| | CDH19 19B5.1 | | | GCGCCTCCGTGAAGGTGTCCTGCAAGGTGTCCGGCTACACCTT |
| | | | | CACCAGCTACTTCATCCACTGGGTCCGACAGGCCCCAGGCCAG |
| | | | | GGCCTGGAATGGATGGGCATCATCAACCCTATCTCCGTGTCCA |
| | | | | CCTCCTACGCCCAGAAATTCCAGGGCAGAGTGACCATGACCCG |
| | | | | GGACACCTCCACCTCCACCGTGTTCATGGAACTGTCCTCCCTG |
| | | | | CGGAGCGAGGACACCGCCGTGTACTACTGCGCCAGAGGCGGCA |
| | | | | TCCAGCTGTGGCTGCACCTGGACTATTGGGGCCAGGGCACCCT |
| | | | | GGTCACCGTGTCCTCTGGTGGCGGAGGATCTGGCGGAGGTGGA |
| | | | | AGCGGAGGCGGCGGATCTCAGTCTGCCCTGACCCAGCCTCCCT |
| | | | | CCACCACCGGCACACCTGGCCAGCGCGTGACCATCTCCTGCTC |
| | | | | CGGCTCCCGGTCCAACATCGGCTCCAACTTCGTGAACTGGTAC |
| | | | | AAGCAGCTGCCCGGCACCGCCCCCAAGGTGCTGATCTACACCA |
| | | | | ACAACCAGCGGCCCTCCGGCGTGCCCGACCGGTTCTCTGGCTC |
| | | | | CAAGTCTGGCACCTCCGCCTCCCTGGCCATCTCCGGCCTGCAG |
| | | | | TCCGAGGACGAGTCCGACTACTACTGTGCCACCTGGGACGACT |
| | | | | CCATGAACGGCTGGGTGTTCGGCGGAGGCACCAAGCTGACCGT |
| | | | | GCTG |
| 1020 | VH-VL of | artificial | AA | QVQLVQSGAEVKKPGASVKVSCKVSGYTFTSYFIHWVRQAPGQ |
| | CDH19 19B5.1 | | | GLEWMGIINPISVSTSYAQKFQGRVTMTRDTSTSTVFMELSSL |
| | | | | RSEDTAVYYCARGGIQLWLHLDYWGQGTLVTVSSGGGGSGGGG |
| | | | | SGGGGSQSALTQPPSTTGTPGQRVTISCSGSRSNIGSNFVNWY |
| | | | | KQLPGTAPKVLIYTNNQRPSGVPDRFSGSKSGTSASLAISGLQ |
| | | | | SEDESDYYCATWDDSMNGWVFGGGTKLTVL |
| 1021 | CDH19 19B5.1 | artificial | | QVQLVQSGAEVKKPGASVKVSCKVSGYTFTSYFIHWVRQAPGQ |
| | x I2C | | | GLEWMGIINPISVSTSYAQKFQGRVTMTRDTSTSTVFMELSSL |
| | | | | RSEDTAVYYCARGGIQLWLHLDYWGQGTLVTVSSGGGGSGGGG |
| | | | | SGGGGSQSALTQPPSTTGTPGQRVTISCSGSRSNIGSNFVNWY |
| | | | | KQLPGTAPKVLIYTNNQRPSGVPDRFSGSKSGTSASLAISGLQ |
| | | | | SEDESDYYCATWDDSMNGWVFGGGTKLTVLSGGGGSEVQLVES |
| | | | | GGGLVQPGGSLKLSCAASGFTFNKYAMNWVRQAPGKGLEWVAR |
| | | | | IRSKYNNYATYYADSVKDRFTISRDDSKNTAYLQMNNLKTEDT |
| | | | | AVYYCVRHGNFGNSYISYWAYWGQGTLVTVSSGGGGSGGGGSG |
| | | | | GGGSQTVVTQEPSLTVSPGGTVTLTCGSSTGAVTSGNYPNWVQ |
| | | | | QKPGQAPRGLIGGTKFLAPGTPARFSGSLLGGKAALTLSGVQP |
| | | | | EDEAEYYCVLWYSNRWVFGGGTKLTVLHHHHHH |
| 1022 | CDR-H1 of | artificial | AA | SYFIH |
| | CDH19 20D3.1 | | | |
| 1023 | CDR-H2 of | artificial | AA | IINPISVSTSYAQKFQG |
| | CDH19 20D3.1 | | | |
| 1024 | CDR-H3 of | artificial | AA | GGIQLWLHFDY |
| | CDH19 20D3.1 | | | |
| 1025 | CDR-L1 of | artificial | AA | SGSSSNIGSNFVN |
| | CDH19 20D3.1 | | | |
| 1026 | CDR-L2 of | artificial | AA | TNNQRPS |
| | CDH19 20D3.1 | | | |
| 1027 | CDR-L3 of | artificial | AA | ATWDDSLNGWV |
| | CDH19 20D3.1 | | | |
| 1028 | VH of CDH19 | artificial | NT | CAGGTGCAGCTGGTGCAGTCTGGCGCCGAAGTGAAGAAACCTG |
| | 20D3.1 | | | GCGCCTCCGTGAAGGTGTCCTGCAAGGTGTCCGGCTACACCTT |
| | | | | CACCAGCTACTTCATCCACTGGGTCCGACAGGCCCCAGGCCAG |
| | | | | GGCCTGGAATGGATGGGCATCATCAACCCTATCTCCGTGTCCA |
| | | | | CCTCCTACGCCCAGAAATTCCAGGGCAGAGTGACCATGACCCG |
| | | | | GGACACCTCCACCTCCACCGTGTTCATGGAACTGTCCTCCCTG |
| | | | | CGGAGCGAGGACACCGCCGTGTACTACTGCGCCAGAGGCGGCA |
| | | | | TCCAGCTGTGGCTGCACTTCGACTACTGGGGCCAGGGCACCCT |
| | | | | GGTCACCGTGTCTAGC |
| 1029 | VH of CDH19 | artificial | AA | QVQLVQSGAEVKKPGASVKVSCKVSGYTFTSYFIHWVRQAPGQ |
| | 20D3.1 | | | GLEWMGIINPISVSTSYAQKFQGRVTMTRDTSTSTVFMELSSL |
| | | | | RSEDTAVYYCARGGIQLWLHFDYWGQGTLVTVSS |
| 1030 | VL of CDH19 | artificial | NT | CAGTCTGCCCTGACCCAGCCTCCTTCTGCCACCGGCACCCCTG |
| | 20D3.1 | | | GCCAGCGCGTGACCATCTCCTGCTCCGGCTCCTCCTCCAACAT |
| | | | | CGGCTCCAACTTCGTGAACTGGTACAAGCAGCTGCCCGGCACC |
| | | | | GCCCCCAAGGTGCTGATCTACACCAACAACCAGCGGCCCTCCG |
| | | | | GCGTGCCCGACCGGTTCTCTGGCTCCAAGTCTGGCACCTCCGC |
| | | | | CTCCCTGGCCATCTCCGGCCTGCAGTCCGAGGACGAGTCCGAC |
| | | | | TACTACTGTGCCACCTGGGACGACTCCCTGAACGGCTGGGTGT |
| | | | | TCGGCGGAGGCACCAAGCTGACCGTGCTG |
| 1031 | VL of CDH19 | artificial | AA | QSALTQPPSATGTPGQRVTISCSGSSSNIGSNFVNWYKQLPGT |
| | 20D3.1 | | | APKVLIYTNNQRPSGVPDRFSGSKSGTSASLAISGLQSEDESD |
| | | | | YYCATWDDSLNGWVFGGGTKLTVL |
| 1032 | VH-VL of | artificial | NT | CAGGTGCAGCTGGTGCAGTCTGGCGCCGAAGTGAAGAAACCTG |
| | CDH19 20D3.1 | | | GCGCCTCCGTGAAGGTGTCCTGCAAGGTGTCCGGCTACACCTT |
| | | | | CACCAGCTACTTCATCCACTGGGTCCGACAGGCCCCAGGCCAG |
| | | | | GGCCTGGAATGGATGGGCATCATCAACCCTATCTCCGTGTCCA |
| | | | | CCTCCTACGCCCAGAAATTCCAGGGCAGAGTGACCATGACCCG |
| | | | | GGACACCTCCACCTCCACCGTGTTCATGGAACTGTCCTCCCTG |
| | | | | CGGAGCGAGGACACCGCCGTGTACTACTGCGCCAGAGGCGGCA |
| | | | | TCCAGCTGTGGCTGCACTTCGACTACTGGGGCCAGGGCACCCT |
| | | | | GGTCACCGTGTCTAGCGGAGGCGGAGGATCTGGTGGCGGTGGT |
| | | | | TCTGGCGGCGGAGGCTCTCAGTCTGCCCTGACCCAGCCTCCTT |
| | | | | CTGCCACCGGCACCCCTGGCCAGCGCGTGACCATCTCCTGCTC |
| | | | | CGGCTCCTCCTCCAACATCGGCTCCAACTTCGTGAACTGGTAC |
| | | | | AAGCAGCTGCCCGGCACCGCCCCCAAGGTGCTGATCTACACCA |
| | | | | ACAACCAGCGGCCCTCCGGCGTGCCCGACCGGTTCTCTGGCTC |
| | | | | CAAGTCTGGCACCTCCGCCTCCCTGGCCATCTCCGGCCTGCAG |
| | | | | TCCGAGGACGAGTCCGACTACTACTGTGCCACCTGGGACGACT |
| | | | | CCCTGAACGGCTGGGTGTTCGGCGGAGGCACCAAGCTGACCGT |
| | | | | GCTG |
| 1033 | VH-VL of | artificial | AA | QVQLVQSGAEVKKPGASVKVSCKVSGYTFTSYFIHWVRQAPGQ |
| | CDH19 20D3.1 | | | GLEWMGIINPISVSTSYAQKFQGRVTMTRDTSTSTVFMELSSL |
| | | | | RSEDTAVYYCARGGIQLWLHFDYWGQGTLVTVSSGGGGSGGGG |
| | | | | SGGGGSQSALTQPPSATGTPGQRVTISCSGSSSNIGSNFVNWY |
| | | | | KQLPGTAPKVLIYTNNQRPSGVPDRFSGSKSGTSASLAISGLQ |
| | | | | SEDESDYYCATWDDSLNGWVFGGGTKLTVL |
| 1034 | CDH19 20D3.1 | artificial | | QVQLVQSGAEVKKPGASVKVSCKVSGYTFTSYFIHWVRQAPGQ |
| | x I2C | | | GLEWMGIINPISVSTSYAQKFQGRVTMTRDTSTSTVFMELSSL |
| | | | | RSEDTAVYYCARGGIQLWLHFDYWGQGTLVTVSSGGGGSGGGG |
| | | | | SGGGGSQSALTQPPSATGTPGQRVTISCSGSSSNIGSNFVNWY |
| | | | | KQLPGTAPKVLIYTNNQRPSGVPDRFSGSKSGTSASLAISGLQ |
| | | | | SEDESDYYCATWDDSLNGWVFGGGTKLTVLSGGGGSEVQLVES |
| | | | | GGGLVQPGGSLKLSCAASGFTFNKYAMNWVRQAPGKGLEWVAR |
| | | | | IRSKYNNYATYYADSVKDRFTISRDDSKNTAYLQMNNLKTEDT |
| | | | | AVYYCVRHGNFGNSYISYWAYWGQGTLVTVSSGGGGSGGGGSG |
| | | | | GGGSQTVVTQEPSLTVSPGGTVTLTCGSSTGAVTSGNYPNWVQ |
| | | | | QKPGQAPRGLIGGTKFLAPGTPARFSGSLLGGKAALTLSGVQP |
| | | | | EDEAEYYCVLWYSNRWVFGGGTKLTVLHHHHHH |
| 1035 | CDR-H1 of | artificial | AA | SYFIH |
| | CDH19 22D1.1 | | | |
| 1036 | CDR-H2 of | artificial | AA | IINPISVSTSYAQKFQG |
| | CDH19 22D1.1 | | | |
| 1037 | CDR-H3 of | artificial | AA | GGIQLWLHLDY |
| | CDH19 22D1.1 | | | |
| 1038 | CDR-L1 of | artificial | AA | SGSSSNIGSNFVN |
| | CDH19 22D1.1 | | | |
| 1039 | CDR-L2 of | artificial | AA | TNNQRPS |
| | CDH19 22D1.1 | | | |
| 1040 | CDR-L3 of | artificial | AA | ATWDDSMNGWV |
| | CDH19 22D1.1 | | | |
| 1041 | VH of CDH19 | artificial | NT | CAGGTGCAGCTGGTGCAGTCTGGCGCCGAAGTGAAGAAACCTG |
| | 22D1.1 | | | GCGCCTCCGTGCGGGTGTCCTGCAAGGTGTCCGGCTACACCTT |
| | | | | CACCAGCTACTTCATCCACTGGGTCCGACAGGCCCCAGGCCAG |
| | | | | GGCCTGGAATGGATGGGCATCATCAACCCTATCTCCGTGTCCA |
| | | | | CCTCCTACGCCCAGAAATTCCAGGGCAGAGTGACCATGACCCG |
| | | | | GGACACCTCCACCTCCACCGTGTTCATGGAACTGTCCTCCCTG |
| | | | | CGGAGCGAGGACACCGCCGTGTACTACTGCGCCAGAGGCGGCA |
| | | | | TCCAGCTGTGGCTGCACCTGGACTATTGGGGCCAGGGCACCCT |
| | | | | GGTCACCGTGTCCTCT |
| 1042 | VH of CDH19 | artificial | AA | QVQLVQSGAEVKKPGASVRVSCKVSGYTFTSYFIHWVRQAPGQ |
| | 22D1.1 | | | GLEWMGIINPISVSTSYAQKFQGRVTMTRDTSTSTVFMELSSL |
| | | | | RSEDTAVYYCARGGIQLWLHLDYWGQGTLVTVSS |
| 1043 | VL of CDH19 | artificial | NT | CAGTCTGCCCTGACCCAGCCTCCTTCCGCTACCGGCACCCCTG |
| | 22D1.1 | | | GCCAGCGCGTGACCATCTCCTGCTCCGGCTCCTCCTCCAACAT |
| | | | | CGGCTCCAACTTCGTGAACTGGTACAAGCAGCTGCCCGGCACC |
| | | | | GCCCCCAAGGTGCTGATCTACACCAACAACCAGCGGCCCTCCG |
| | | | | GCGTGCCCGACCGGTTCTCTGGCTCCAAGTCTGGCACCTCCGC |
| | | | | CTCCCTGGCCATCTCCGGCCTGCAGTCCGAGGACGAGTCCGAC |
| | | | | TACTACTGTGCCACCTGGGACGACTCCATGAACGGCTGGGTGT |
| | | | | TCGGCGGAGGCACCAAGCTGACCGTGCTG |
| 1044 | VL of CDH19 | artificial | AA | QSALTQPPSATGTPGQRVTISCSGSSSNIGSNFVNWYKQLPGT |
| | 22D1.1 | | | APKVLIYTNNQRPSGVPDRFSGSKSGTSASLAISGLQSEDESD |
| | | | | YYCATWDDSMNGWVFGGGTKLTVL |
| 1045 | VH-VL of | artificial | NT | CAGGTGCAGCTGGTGCAGTCTGGCGCCGAAGTGAAGAAACCTG |
| | CDH19 22D1.1 | | | GCGCCTCCGTGCGGGTGTCCTGCAAGGTGTCCGGCTACACCTT |
| | | | | CACCAGCTACTTCATCCACTGGGTCCGACAGGCCCCAGGCCAG |
| | | | | GGCCTGGAATGGATGGGCATCATCAACCCTATCTCCGTGTCCA |
| | | | | CCTCCTACGCCCAGAAATTCCAGGGCAGAGTGACCATGACCCG |
| | | | | GGACACCTCCACCTCCACCGTGTTCATGGAACTGTCCTCCCTG |
| | | | | CGGAGCGAGGACACCGCCGTGTACTACTGCGCCAGAGGCGGCA |
| | | | | TCCAGCTGTGGCTGCACCTGGACTATTGGGGCCAGGGCACCCT |
| | | | | GGTCACCGTGTCCTCTGGTGGCGGAGGATCTGGCGGAGGTGGA |
| | | | | AGCGGAGGCGGCGGATCTCAGTCTGCCCTGACCCAGCCTCCTT |
| | | | | CCGCTACCGGCACCCCTGGCCAGCGCGTGACCATCTCCTGCTC |
| | | | | CGGCTCCTCCTCCAACATCGGCTCCAACTTCGTGAACTGGTAC |
| | | | | AAGCAGCTGCCCGGCACCGCCCCCAAGGTGCTGATCTACACCA |
| | | | | ACAACCAGCGGCCCTCCGGCGTGCCCGACCGGTTCTCTGGCTC |
| | | | | CAAGTCTGGCACCTCCGCCTCCCTGGCCATCTCCGGCCTGCAG |
| | | | | TCCGAGGACGAGTCCGACTACTACTGTGCCACCTGGGACGACT |
| | | | | CCATGAACGGCTGGGTGTTCGGCGGAGGCACCAAGCTGACCGT |
| | | | | GCTG |
| 1046 | VH-VL of | artificial | AA | QVQLVQSGAEVKKPGASVRVSCKVSGYTFTSYFIHWVRQAPGQ |
| | CDH19 22D1.1 | | | GLEWMGIINPISVSTSYAQKFQGRVTMTRDTSTSTVFMELSSL |
| | | | | RSEDTAVYYCARGGIQLWLHLDYWGQGTLVTVSSGGGGSGGGG |
| | | | | SGGGGSQSALTQPPSATGTPGQRVTISCSGSSSNIGSNFVNWY |
| | | | | KQLPGTAPKVLIYTNNQRPSGVPDRFSGSKSGTSASLAISGLQ |
| | | | | SEDESDYYCATWDDSMNGWVFGGGTKLTVL |
| 1047 | CDH19 22D1.1 | artificial | | QVQLVQSGAEVKKPGASVRVSCKVSGYTFTSYFIHWVRQAPGQ |
| | x I2C | | | GLEWMGIINPISVSTSYAQKFQGRVTMTRDTSTSTVFMELSSL |
| | | | | RSEDTAVYYCARGGIQLWLHLDYWGQGTLVTVSSGGGGSGGGG |
| | | | | SGGGGSQSALTQPPSATGTPGQRVTISCSGSSSNIGSNFVNWY |
| | | | | KQLPGTAPKVLIYTNNQRPSGVPDRFSGSKSGTSASLAISGLQ |
| | | | | SEDESDYYCATWDDSMNGWVFGGGTKLTVLSGGGGSEVQLVES |
| | | | | GGGLVQPGGSLKLSCAASGFTFNKYAMNWVRQAPGKGLEWVAR |
| | | | | IRSKYNNYATYYADSVKDRFTISRDDSKNTAYLQMNNLKTEDT |
| | | | | AVYYCVRHGNFGNSYISYWAYWGQGTLVTVSSGGGGSGGGGSG |
| | | | | GGGSQTVVTQEPSLTVSPGGTVTLTCGSSTGAVTSGNYPNWVQ |
| | | | | QKPGQAPRGLIGGTKFLAPGTPARFSGSLLGGKAALTLSGVQP |
| | | | | EDEAEYYCVLWYSNRWVFGGGTKLTVLHHHHHH |
| 1048 | CDR-H1 of | artificial | AA | SYAMN |
| | CDH19 | | | |
| | 22G10.1 | | | |
| 1049 | CDR-H2 of | artificial | AA | TISGGGANTYYADSVKG |
| | CDH19 | | | |
| | 22G10.1 | | | |
| 1050 | CDR-H3 of | artificial | AA | GGMGGYYYGMDV |
| | CDH19 | | | |
| | 22G10.1 | | | |
| 1051 | CDR-L1 of | artificial | AA | RASQSISSNLA |
| | CDH19 | | | |
| | 22G10.1 | | | |
| 1052 | CDR-L2 of | artificial | AA | GAFTRAT |
| | CDH19 | | | |
| | 22G10.1 | | | |
| 1053 | CDR-L3 of | artificial | AA | QQYNYWPLT |
| | CDH19 | | | |
| | 22G10.1 | | | |
| 1054 | VH of CDH19 | artificial | NT | GAGGTGCAGCTGCTGGAATCCGGCGGAGGACTGGTGCAGCCTG |
| | 22G10.1 | | | GCGGCTCCCTGAGACTGTCTTGCGCCGCCTCCGGCTTCACCTT |
| | | | | CTCCAGCTACGCCATGAACTGGGTCCGACAGGCCCCTGGCAAG |
| | | | | GGCCTGGAATGGGTGTCCACCATCAGCGGCGGAGGCGCCAACA |
| | | | | CCTACTACGCCGACTCCGTGAAGGGCCGGTTCACCATCTCCTC |
| | | | | CGACAACTCCAAGTCCACCCTGTACCTGCAGATGAACTCCCTG |
| | | | | AGAGCCGCCGACACCGCCGTGTACCACTGTGCTAAGGGCGGCA |
| | | | | TGGGCGGCTACTACTACGGCATGGATGTGTGGGGCCAGGGCAC |
| | | | | CACCGTGACCGTGTCTAGC |
| 1055 | VH of CDH19 | artificial | AA | EVQLLESGGGLVQPGGSLRLSCAASGFTESSYAMNWVRQAPGK |
| | 22G10.1 | | | GLEWVSTISGGGANTYYADSVKGRFTISSDNSKSTLYLQMNSL |
| | | | | RAADTAVYHCAKGGMGGYYYGMDVWGQGTTVTVSS |
| 1056 | VL of CDH19 | artificial | NT | GAGATCGTGATGACCCAGTCCCCCGTGACCCTGTCCCTGAGCC |
| | 22G10.1 | | | TGGGCGAGAGAGCCACCCTGTCTTGCCGGGCCTCCCAGTCCAT |
| | | | | CTCCAGCAACCTGGCCTGGTTCCAGCAGAAGCCCGGCCAGGCC |
| | | | | CCTCGGCTGCTGATCTACGGCGCCTTTACCCGGGCCACCGGCA |
| | | | | TCCCTGCCAGAGTGTCTGGCTCCGGCTCCGGCACCGAGTTCAC |
| | | | | CCTGACCATCAGCTCCCTGCAGTCCGAGGACTTTGCCGTGTAC |
| | | | | TACTGCCAGCAGTACAACTACTGGCCCCTGACCTTCGGAGGCG |
| | | | | GCACCAAGGTGGAAATCAAG |
| 1057 | VL of CDH19 | artificial | AA | EIVMTQSPVTLSLSLGERATLSCRASQSISSNLAWFQQKPGQA |
| | 22G10.1 | | | PRLLIYGAFTRATGIPARVSGSGSGTEFTLTISSLQSEDFAVY |
| | | | | YCQQYNYWPLTFGGGTKVEIK |
| 1058 | VH-VL of | artificial | NT | GAGGTGCAGCTGCTGGAATCCGGCGGAGGACTGGTGCAGCCTG |
| | CDH19 | | | GCGGCTCCCTGAGACTGTCTTGCGCCGCCTCCGGCTTCACCTT |
| | 22G10.1 | | | CTCCAGCTACGCCATGAACTGGGTCCGACAGGCCCCTGGCAAG |
| | | | | GGCCTGGAATGGGTGTCCACCATCAGCGGCGGAGGCGCCAACA |
| | | | | CCTACTACGCCGACTCCGTGAAGGGCCGGTTCACCATCTCCTC |
| | | | | CGACAACTCCAAGTCCACCCTGTACCTGCAGATGAACTCCCTG |
| | | | | AGAGCCGCCGACACCGCCGTGTACCACTGTGCTAAGGGCGGCA |
| | | | | TGGGCGGCTACTACTACGGCATGGATGTGTGGGGCCAGGGCAC |
| | | | | CACCGTGACCGTGTCTAGCGGAGGCGGAGGATCTGGCGGTGGT |
| | | | | GGTTCTGGCGGAGGCGGCTCCGAGATCGTGATGACCCAGTCCC |
| | | | | CCGTGACCCTGTCCCTGAGCCTGGGCGAGAGAGCCACCCTGTC |
| | | | | TTGCCGGGCCTCCCAGTCCATCTCCAGCAACCTGGCCTGGTTC |
| | | | | CAGCAGAAGCCCGGCCAGGCCCCTCGGCTGCTGATCTACGGCG |
| | | | | CCTTTACCCGGGCCACCGGCATCCCTGCCAGAGTGTCTGGCTC |
| | | | | CGGCTCCGGCACCGAGTTCACCCTGACCATCAGCTCCCTGCAG |
| | | | | TCCGAGGACTTTGCCGTGTACTACTGCCAGCAGTACAACTACT |
| | | | | GGCCCCTGACCTTCGGAGGCGGCACCAAGGTGGAAATCAAG |
| 1059 | VH-VL of | artificial | AA | EVQLLESGGGLVQPGGSLRLSCAASGFTFSSYAMNWVRQAPGK |
| | CDH19 | | | GLEWVSTISGGGANTYYADSVKGRFTISSDNSKSTLYLQMNSL |
| | 22G10.1 | | | RAADTAVYHCAKGGMGGYYYGMDVWGQGTTVTVSSGGGGSGGG |
| | | | | GSGGGGSEIVMTQSPVTLSLSLGERATLSCRASQSISSNLAWF |
| | | | | QQKPGQAPRLLIYGAFTRATGIPARVSGSGSGTEFTLTISSLQ |
| | | | | SEDFAVYYCQQYNYWPLTFGGGTKVEIK |
| 1060 | CDH19 | artificial | | EVQLLESGGGLVQPGGSLRLSCAASGFTFSSYAMNWVRQAPGK |
| | 22G10.1 x I2C | | | GLEWVSTISGGGANTYYADSVKGRFTISSDNSKSTLYLQMNSL |
| | | | | RAADTAVYHCAKGGMGGYYYGMDVWGQGTTVTVSSGGGGSGGG |
| | | | | GSGGGGSEIVMTQSPVTLSLSLGERATLSCRASQSISSNLAWF |
| | | | | QQKPGQAPRLLIYGAFTRATGIPARVSGSGSGTEFTLTISSLQ |
| | | | | SEDFAVYYCQQYNYWPLTFGGGTKVEIKSGGGGSEVQLVESGG |
| | | | | GLVQPGGSLKLSCAASGFTFNKYAMNWVRQAPGKGLEWVARIR |
| | | | | SKYNNYATYYADSVKDRFTISRDDSKNTAYLQMNNLKTEDTAV |
| | | | | YYCVRHGNFGNSYISYWAYWGQGTLVTVSSGGGGSGGGGSGGG |
| | | | | GSQTVVTQEPSLTVSPGGTVTLTCGSSTGAVTSGNYPNWVQQK |
| | | | | PGQAPRGLIGGTKFLAPGTPARFSGSLLGGKAALTLSGVQPED |
| | | | | EAEYYCVLWYSNRWVFGGGTKLTVLHHHHHH |
| 1061 | CDR-H1 of | artificial | AA | RYGIH |
| | CDH19 | | | |
| | 23A10.3 | | | |
| 1062 | CDR-H2 of | artificial | AA | VIWYDGSNKYYADSVKG |
| | CDH19 | | | |
| | 23A10.3 | | | |
| 1063 | CDR-H3 of | artificial | AA | RAGIPGTTGYYYGMDV |
| | CDH19 | | | |
| | 23A10.3 | | | |
| 1064 | CDR-L1 of | artificial | AA | SGDRLGEKYVC |
| | CDH19 | | | |
| | 23A10.3 | | | |
| 1065 | CDR-L2 of | artificial | AA | QDNKWPS |
| | CDH19 | | | |
| | 23A10.3 | | | |
| 1066 | CDR-L3 of | artificial | AA | QAWDSSTVV |
| | CDH19 | | | |
| | 23A10.3 | | | |
| 1067 | VH of CDH19 | artificial | NT | CAGGTGCAGCTGGTGGAATCCGGCGGAGGCGTGGTGCAGCCTG |
| | 23A10.3 | | | GCCGGTCCCTGAGACTGTCTTGCGCCGCCTCCGGCTTCACCTT |
| | | | | CTCCAGATACGGCATCCACTGGGTCCGACAGGCCCCTGGCAAG |
| | | | | GGCCTGGAATGGGTGGCCGTGATTTGGTACGACGGCTCCAACA |
| | | | | AGTACTACGCCGACTCCGTGAAGGGCCGGTTCACCATCTCCCG |
| | | | | GGACAACTCCAAGAACACCCTGTACCTGCTGATGAACTCCCTG |
| | | | | CGGGCCGAGGACTCCGCCGTGTACTACTGTGCCAGAAGGGCCG |
| | | | | GCATCCCCGGCACCACCGGCTACTACTACGGCATGGATGTGTG |
| | | | | GGGCCAGGGCACCACCGTGACCGTGTCTAGC |
| 1068 | VH of CDH19 | artificial | AA | QVQLVESGGGVVQPGRSLRLSCAASGFTFSRYGIHWVRQAPGK |
| | 23A10.3 | | | GLEWVAVIWYDGSNKYYADSVKGRFTISRDNSKNTLYLLMNSL |
| | | | | RAEDSAVYYCARRAGIPGTTGYYYGMDVWGQGTTVTVSS |
| 1069 | VL of CDH19 | artificial | NT | TACGAGCTGACCCAGCCCCCCTCCGTGTCCGTGTCTCCTGGCC |
| | 23A10.3 | | | AGACCGCCTCCATCACCTGTTCTGGCGACCGGCTGGGCGAGAA |
| | | | | ATACGTGTGCTGGTATCAGCAGAAGCCCGGCCAGTCCCCCATC |
| | | | | CTGGTCATCTACCAGGACAACAAGTGGCCCTCCGGCATCCCTG |
| | | | | AGCGGTTCTCCGGCTCCAACTCCGGCAACACCGCCACCCTGAC |
| | | | | CATCTCCGGCACCCAGGCCATGGACGAGGCCGACTACTACTGC |
| | | | | CAGGCCTGGGACTCCTCCACCGTGGTGTTCGGCGGAGGCACCA |
| | | | | AGCTGACCGTGCTG |
| 1070 | VL of CDH19 | artificial | AA | SYELTQPPSVSVSPGQTASITCSGDRLGEKYVCWYQQKPGQSP |
| | 23A10.3 | | | ILVIYQDNKWPSGIPERFSGSNSGNTATLTISGTQAMDEADYY |
| | | | | CQAWDSSTVVFGGGTKLTVL |
| 1071 | VH-VL of | artificial | NT | CAGGTGCAGCTGGTGGAATCCGGCGGAGGCGTGGTGCAGCCTG |
| | CDH19 | | | GCCGGTCCCTGAGACTGTCTTGCGCCGCCTCCGGCTTCACCTT |
| | 23A10.3 | | | CTCCAGATACGGCATCCACTGGGTCCGACAGGCCCCTGGCAAG |
| | | | | GGCCTGGAATGGGTGGCCGTGATTTGGTACGACGGCTCCAACA |
| | | | | AGTACTACGCCGACTCCGTGAAGGGCCGGTTCACCATCTCCCG |
| | | | | GGACAACTCCAAGAACACCCTGTACCTGCTGATGAACTCCCTG |
| | | | | CGGGCCGAGGACTCCGCCGTGTACTACTGTGCCAGAAGGGCCG |
| | | | | GCATCCCCGGCACCACCGGCTACTACTACGGCATGGATGTGTG |
| | | | | GGGCCAGGGCACCACCGTGACCGTGTCTAGCGGAGGCGGAGGA |
| | | | | TCTGGTGGCGGTGGTTCTGGCGGCGGAGGCTCCTCTTACGAGC |
| | | | | TGACCCAGCCCCCCTCCGTGTCCGTGTCTCCTGGCCAGACCGC |
| | | | | CTCCATCACCTGTTCTGGCGACCGGCTGGGCGAGAAATACGTG |
| | | | | TGCTGGTATCAGCAGAAGCCCGGCCAGTCCCCCATCCTGGTCA |
| | | | | TCTACCAGGACAACAAGTGGCCCTCCGGCATCCCTGAGCGGTT |
| | | | | CTCCGGCTCCAACTCCGGCAACACCGCCACCCTGACCATCTCC |
| | | | | GGCACCCAGGCCATGGACGAGGCCGACTACTACTGCCAGGCCT |
| | | | | GGGACTCCTCCACCGTGGTGTTCGGCGGAGGCACCAAGCTGAC |
| | | | | CGTGCTG |
| 1072 | VH-VL of | artificial | AA | QVQLVESGGGVVQPGRSLRLSCAASGFTFSRYGIHWVRQAPGK |
| | CDH19 | | | GLEWVAVIWYDGSNKYYADSVKGRFTISRDNSKNTLYLLMNSL |
| | 23A10.3 | | | RAEDSAVYYCARRAGIPGTTGYYYGMDVWGQGTTVTVSSGGGG |
| | | | | SGGGGSGGGGSSYELTQPPSVSVSPGQTASITCSGDRLGEKYV |
| | | | | CWYQQKPGQSPILVIYQDNKWPSGIPERFSGSNSGNTATLTIS |
| | | | | GTQAMDEADYYCQAWDSSTVVFGGGTKLTVL |
| 1073 | CDH19 | artificial | | QVQLVESGGGVVQPGRSLRLSCAASGFTFSRYGIHWVRQAPGK |
| | 23A10.3 x I2C | | | GLEWVAVIWYDGSNKYYADSVKGRFTISRDNSKNTLYLLMNSL |
| | | | | RAEDSAVYYCARRAGIPGTTGYYYGMDVWGQGTTVTVSSGGGG |
| | | | | SGGGGSGGGGSSYELTQPPSVSVSPGQTASITCSGDRLGEKYV |
| | | | | CWYQQKPGQSPILVIYQDNKWPSGIPERFSGSNSGNTATLTIS |
| | | | | GTQAMDEADYYCQAWDSSTVVFGGGTKLTVLSGGGGSEVQLVE |
| | | | | SGGGLVQPGGSLKLSCAASGFTFNKYAMNWVRQAPGKGLEWVA |
| | | | | RIRSKYNNYATYYADSVKDRFTISRDDSKNTAYLQMNNLKTED |
| | | | | TAVYYCVRHGNFGNSYISYWAYWGQGTLVTVSSGGGGSGGGGS |
| | | | | GGGGSQTVVTQEPSLTVSPGGTVTLTCGSSTGAVTSGNYPNWV |
| | | | | QQKPGQAPRGLIGGTKFLAPGTPARFSGSLLGGKAALTLSGVQ |
| | | | | PEDEAEYYCVLWYSNRWVFGGGTKLTVLHHHHHH |
| 1074 | CDR-H1 of | artificial | AA | SYYIH |
| | CDH19 25F8.1 | | | |
| 1075 | CDR-H2 of | artificial | AA | IINPSGGSTRYAQKFQG |
| | CDH19 25F8.1 | | | |
| 1076 | CDR-H3 of | artificial | AA | GGIQLWLHFDY |
| | CDH19 25F8.1 | | | |
| 1077 | CDR-L1 of | artificial | AA | SGSSSNIGRNFVN |
| | CDH19 25F8.1 | | | |
| 1078 | CDR-L2 of | artificial | AA | TNNQRPS |
| | CDH19 25F8.1 | | | |
| 1079 | CDR-L3 of | artificial | AA | AAWDDSLNGWV |
| | CDH19 25F8.1 | | | |
| 1080 | VH of CDH19 | artificial | NT | CAGGTGCAGCTGGTGCAGTCTGGCGCCGAAGTGAAGAAACCTG |
| | 25F8.1 | | | GCGCCTCCGTGAAGGTGTCCTGCAAGGCCTCCGGCTACACCTT |
| | | | | CACCAGCTACTACATCCACTGGGTCCGACAGGCCCCAGGCCAG |
| | | | | GGCCTGGAATGGATGGGCATCATCAACCCCTCCGGCGGCTCCA |
| | | | | CCAGATACGCCCAGAAATTCCAGGGCAGAGTGACCATGACCCG |
| | | | | GGACACCTCCACCTCCACCGTGTTCATGGAACTGTCCTCCCTG |
| | | | | CGGAGCGAGGACACCGCCGTGTACTACTGCGCCAGAGGCGGCA |
| | | | | TCCAGCTGTGGCTGCACTTCGACTACTGGGGCCAGGGCACCCT |
| | | | | GGTCACCGTGTCTAGC |
| 1081 | VH of CDH19 | artificial | AA | QVQLVQSGAEVKKPGASVKVSCKASGYTFTSYYIHWVRQAPGQ |
| | 25F8.1 | | | GLEWMGIINPSGGSTRYAQKFQGRVTMTRDTSTSTVFMELSSL |
| | | | | RSEDTAVYYCARGGIQLWLHFDYWGQGTLVTVSS |
| 1082 | VL of CDH19 | artificial | NT | CAGTCTGCCCTGACCCAGCCTCCTTCTGCCACCGGCACCCCTG |
| | 25F8.1 | | | GCCAGCGCGTGACCATCTCCTGCTCCGGCTCCTCCTCCAACAT |
| | | | | CGGCCGGAACTTCGTGAACTGGTACAAGCAGCTGCCCGGCACC |
| | | | | GCCCCCAAGGTGCTGATCTACACCAACAACCAGCGGCCCTCCG |
| | | | | GCGTGCCCGACCGGTTCTCTGGCTCCAAGTCTGGCACCTCCGC |
| | | | | CTCCCTGGCCATCTCCGGCCTGCAGTCCGAGGACGAGTCCGAC |
| | | | | TACTACTGTGCCGCCTGGGACGACTCCCTGAACGGCTGGGTGT |
| | | | | TCGGCGGAGGCACCAAGCTGACCGTGCTG |
| 1083 | VL of CDH19 | artificial | AA | QSALTQPPSATGTPGQRVTISCSGSSSNIGRNFVNWYKQLPGT |
| | 25F8.1 | | | APKVLIYTNNQRPSGVPDRFSGSKSGTSASLAISGLQSEDESD |
| | | | | YYCAAWDDSLNGWVFGGGTKLTVL |
| 1084 | VH-VL of | artificial | NT | CAGGTGCAGCTGGTGCAGTCTGGCGCCGAAGTGAAGAAACCTG |
| | CDH19 25F8.1 | | | GCGCCTCCGTGAAGGTGTCCTGCAAGGCCTCCGGCTACACCTT |
| | | | | CACCAGCTACTACATCCACTGGGTCCGACAGGCCCCAGGCCAG |
| | | | | GGCCTGGAATGGATGGGCATCATCAACCCCTCCGGCGGCTCCA |
| | | | | CCAGATACGCCCAGAAATTCCAGGGCAGAGTGACCATGACCCG |
| | | | | GGACACCTCCACCTCCACCGTGTTCATGGAACTGTCCTCCCTG |
| | | | | CGGAGCGAGGACACCGCCGTGTACTACTGCGCCAGAGGCGGCA |
| | | | | TCCAGCTGTGGCTGCACTTCGACTACTGGGGCCAGGGCACCCT |
| | | | | GGTCACCGTGTCTAGCGGAGGCGGAGGATCTGGTGGCGGTGGT |
| | | | | TCTGGCGGCGGAGGCTCTCAGTCTGCCCTGACCCAGCCTCCTT |
| | | | | CTGCCACCGGCACCCCTGGCCAGCGCGTGACCATCTCCTGCTC |
| | | | | CGGCTCCTCCTCCAACATCGGCCGGAACTTCGTGAACTGGTAC |
| | | | | AAGCAGCTGCCCGGCACCGCCCCCAAGGTGCTGATCTACACCA |
| | | | | ACAACCAGCGGCCCTCCGGCGTGCCCGACCGGTTCTCTGGCTC |
| | | | | CAAGTCTGGCACCTCCGCCTCCCTGGCCATCTCCGGCCTGCAG |
| | | | | TCCGAGGACGAGTCCGACTACTACTGTGCCGCCTGGGACGACT |
| | | | | CCCTGAACGGCTGGGTGTTCGGCGGAGGCACCAAGCTGACCGT |
| | | | | GCTG |
| 1085 | VH-VL of | artificial | AA | QVQLVQSGAEVKKPGASVKVSCKASGYTFTSYYIHWVRQAPGQ |
| | CDH19 25F8.1 | | | GLEWMGIINPSGGSTRYAQKFQGRVTMTRDTSTSTVFMELSSL |
| | | | | RSEDTAVYYCARGGIQLWLHFDYWGQGTLVTVSSGGGGSGGGG |
| | | | | SGGGGSQSALTQPPSATGTPGQRVTISCSGSSSNIGRNFVNWY |
| | | | | KQLPGTAPKVLIYTNNQRPSGVPDRFSGSKSGTSASLAISGLQ |
| | | | | SEDESDYYCAAWDDSLNGWVFGGGTKLTVL |
| 1086 | CDH19 25F8.1 | artificial | | QVQLVQSGAEVKKPGASVKVSCKASGYTFTSYYIHWVRQAPGQ |
| | x I2C | | | GLEWMGIINPSGGSTRYAQKFQGRVTMTRDTSTSTVFMELSSL |
| | | | | RSEDTAVYYCARGGIQLWLHFDYWGQGTLVTVSSGGGGSGGGG |
| | | | | SGGGGSQSALTQPPSATGTPGQRVTISCSGSSSNIGRNFVNWY |
| | | | | KQLPGTAPKVLIYTNNQRPSGVPDRFSGSKSGTSASLAISGLQ |
| | | | | SEDESDYYCAAWDDSLNGWVFGGGTKLTVLSGGGGSEVQLVES |
| | | | | GGGLVQPGGSLKLSCAASGFTFNKYAMNWVRQAPGKGLEWVAR |
| | | | | IRSKYNNYATYYADSVKDRFTISRDDSKNTAYLQMNNLKTEDT |
| | | | | AVYYCVRHGNFGNSYISYWAYWGQGTLVTVSSGGGGSGGGGSG |
| | | | | GGGSQTVVTQEPSLTVSPGGTVTLTCGSSTGAVTSGNYPNWVQ |
| | | | | QKPGQAPRGLIGGTKFLAPGTPARFSGSLLGGKAALTLSGVQP |
| | | | | EDEAEYYCVLWYSNRWVFGGGTKLTVLHHHHHH |
| 1087 | CDR-H1 of | artificial | AA | GYYWS |
| | CDH19 | | | |
| | 25G10.1 | | | |
| 1088 | CDR-H2 of | artificial | AA | YIYYIGSTNYNPSLKS |
| | CDH19 | | | |
| | 25G10.1 | | | |
| 1089 | CDR-H3 of | artificial | AA | DGSSGWYRWFDP |
| | CDH19 | | | |
| | 25G10.1 | | | |
| 1090 | CDR-L1 of | artificial | AA | RASQSVSSSYLA |
| | CDH19 | | | |
| | 25G10.1 | | | |
| 1091 | CDR-L2 of | artificial | AA | GASSRAT |
| | CDH19 | | | |
| | 25G10.1 | | | |
| 1092 | CDR-L3 of | artificial | AA | QQYGNSPLT |
| | CDH19 | | | |
| | 25G10.1 | | | |
| 1093 | VH of CDH19 | artificial | NT | CAGGTGCAGCTGCAGGAATCCGGCCCTGGCCTGGTCAAGCCCT |
| | 25G10.1 | | | CCGAGACACTGTCCCTGACCTGCACCGTGTCCGGCGGCTCCAT |
| | | | | CTCCGGCTACTACTGGTCCTGGATCCGGCAGCCCCCTGGCAAG |
| | | | | GGCCTGGAATGGATCGGCTACATCTACTACATCGGCTCCACCA |
| | | | | ACTACAACCCCAGCCTGAAGTCCAGAGTGACCATGTCCGTGGA |
| | | | | CACCTCCAAGAACCAGTTCTCCCTGAAGCTGTCCTCCGTGACC |
| | | | | GCCGCTGACACCGCCGTGTACTACTGCGCCAGAGATGGCTCCT |
| | | | | CCGGCTGGTATCGTTGGTTCGACCCTTGGGGCCAGGGCACCCT |
| | | | | GGTCACCGTGTCTAGC |
| 1094 | VH of CDH19 | artificial | AA | QVQLQESGPGLVKPSETLSLTCTVSGGSISGYYWSWIRQPPGK |
| | 25G10.1 | | | GLEWIGYIYYIGSTNYNPSLKSRVTMSVDTSKNQFSLKLSSVT |
| | | | | AADTAVYYCARDGSSGWYRWFDPWGQGTLVTVSS |
| 1095 | VL of CDH19 | artificial | NT | GAGATCGTGCTGACCCAGTCCCCTGGCACCCTGTCCCTGAGCC |
| | 25G10.1 | | | CTGGCGAGAGAGCCACCCTGTCCTGCAGAGCCTCCCAGTCCGT |
| | | | | GTCCTCCTCCTACCTGGCTTGGTATCAGCAGAAGCCCGGCCAG |
| | | | | GCCCCTCGGCTGCTGATCTTCGGCGCCTCTTCCAGAGCCACCG |
| | | | | GCATCCCTGACCGGTTCTCCGGCTCTGGCTCCGGCACCGACTT |
| | | | | CACCCTGACCATCTCCCGGCTGGAACCCGAGGACTTCGCTGTG |
| | | | | TACCACTGCCAGCAGTACGGCAACAGCCCCCTGACCTTCGGCG |
| | | | | GAGGCACCAAGGTGGAAATCAAG |
| 1096 | VL of CDH19 | artificial | AA | EIVLTQSPGTLSLSPGERATLSCRASQSVSSSYLAWYQQKPGQ |
| | 25G10.1 | | | APRLLIFGASSRATGIPDRFSGSGSGTDFTLTISRLEPEDFAV |
| | | | | YHCQQYGNSPLTFGGGTKVEIK |
| 1097 | VH-VL of | artificial | NT | CAGGTGCAGCTGCAGGAATCCGGCCCTGGCCTGGTCAAGCCCT |
| | CDH19 | | | CCGAGACACTGTCCCTGACCTGCACCGTGTCCGGCGGCTCCAT |
| | 25G10.1 | | | CTCCGGCTACTACTGGTCCTGGATCCGGCAGCCCCCTGGCAAG |
| | | | | GGCCTGGAATGGATCGGCTACATCTACTACATCGGCTCCACCA |
| | | | | ACTACAACCCCAGCCTGAAGTCCAGAGTGACCATGTCCGTGGA |
| | | | | CACCTCCAAGAACCAGTTCTCCCTGAAGCTGTCCTCCGTGACC |
| | | | | GCCGCTGACACCGCCGTGTACTACTGCGCCAGAGATGGCTCCT |
| | | | | CCGGCTGGTATCGTTGGTTCGACCCTTGGGGCCAGGGCACCCT |
| | | | | GGTCACCGTGTCTAGCGGAGGCGGAGGATCTGGTGGCGGTGGT |
| | | | | TCTGGCGGCGGAGGCTCCGAGATCGTGCTGACCCAGTCCCCTG |
| | | | | GCACCCTGTCCCTGAGCCCTGGCGAGAGAGCCACCCTGTCCTG |
| | | | | CAGAGCCTCCCAGTCCGTGTCCTCCTCCTACCTGGCTTGGTAT |
| | | | | CAGCAGAAGCCCGGCCAGGCCCCTCGGCTGCTGATCTTCGGCG |
| | | | | CCTCTTCCAGAGCCACCGGCATCCCTGACCGGTTCTCCGGCTC |
| | | | | TGGCTCCGGCACCGACTTCACCCTGACCATCTCCCGGCTGGAA |
| | | | | CCCGAGGACTTCGCTGTGTACCACTGCCAGCAGTACGGCAACA |
| | | | | GCCCCCTGACCTTCGGCGGAGGCACCAAGGTGGAAATCAAG |
| 1098 | VH-VL of | artificial | AA | QVQLQESGPGLVKPSETLSLTCTVSGGSISGYYWSWIRQPPGK |
| | CDH19 | | | GLEWIGYIYYIGSTNYNPSLKSRVTMSVDTSKNQFSLKLSSVT |
| | 25G10.1 | | | AADTAVYYCARDGSSGWYRWFDPWGQGTLVTVSSGGGGSGGGG |
| | | | | SGGGGSEIVLTQSPGTLSLSPGERATLSCRASQSVSSSYLAWY |
| | | | | QQKPGQAPRLLIFGASSRATGIPDRFSGSGSGTDFTLTISRLE |
| | | | | PEDFAVYHCQQYGNSPLTFGGGTKVEIK |
| 1099 | CDH19 | artificial | | QVQLQESGPGLVKPSETLSLTCTVSGGSISGYYWSWIRQPPGK |
| | 25G10.1 x I2C | | | GLEWIGYIYYIGSTNYNPSLKSRVTMSVDTSKNQFSLKLSSVT |
| | | | | AADTAVYYCARDGSSGWYRWFDPWGQGTLVTVSSGGGGSGGGG |
| | | | | SGGGGSEIVLTQSPGTLSLSPGERATLSCRASQSVSSSYLAWY |
| | | | | QQKPGQAPRLLIFGASSRATGIPDRFSGSGSGTDFTLTISRLE |
| | | | | PEDFAVYHCQQYGNSPLTFGGGTKVEIKSGGGGSEVQLVESGG |
| | | | | GLVQPGGSLKLSCAASGFTFNKYAMNWVRQAPGKGLEWVARIR |
| | | | | SKYNNYATYYADSVKDRFTISRDDSKNTAYLQMNNLKTEDTAV |
| | | | | YYCVRHGNFGNSYISYWAYWGQGTLVTVSSGGGGSGGGGSGGG |
| | | | | GSQTVVTQEPSLTVSPGGTVTLTCGSSTGAVTSGNYPNWVQQK |
| | | | | PGQAPRGLIGGTKFLAPGTPARFSGSLLGGKAALTLSGVQPED |
| | | | | EAEYYCVLWYSNRWVFGGGTKLTVLHHHHHH |
| 1100 | CDR-H1 of | artificial | AA | SYYMS |
| | CDH19 26D1.1 | | | |
| 1101 | CDR-H2 of | artificial | AA | IIHPSGGDTTYAQKFQG |
| | CDH19 26D1.1 | | | |
| 1102 | CDR-H3 of | artificial | AA | GGIKLWLHFDY |
| | CDH19 26D1.1 | | | |
| 1103 | CDR-L1 of | artificial | AA | SGSRSNIGSNFVN |
| | CDH19 26D1.1 | | | |
| 1104 | CDR-L2 of | artificial | AA | TNNQRPS |
| | CDH19 26D1.1 | | | |
| 1105 | CDR-L3 of | artificial | AA | AVWDDSLNGWV |
| | CDH19 26D1.1 | | | |
| 1106 | VH of CDH19 | artificial | NT | CAGGTGCAGCTGGTGCAGTCTGGCGCCGAAGTGAAGAAACCTG |
| | 26D1.1 | | | GCGCCTCCGTGAAGGTGTCCTGCAAGGCCTCCCGGTACACCTT |
| | | | | CACCAGCTACTACATGTCCTGGGTCCGACAGGCCCCAGGCCAG |
| | | | | GGCCTGGAATGGATGGGCATCATCCACCCCTCTGGCGGCGACA |
| | | | | CCACCTACGCCCAGAAATTCCAGGGCAGAGTGACCATGACCGG |
| | | | | CGACACCTCCACCTCCACCGTGTATATGGAACTGTCCTCCCTG |
| | | | | CGGAGCGAGGACACCGCCGTGTACTACTGCGCCAGAGGCGGCA |
| | | | | TCAAGCTGTGGCTGCACTTCGACTACTGGGGCCAGGGCACCCT |
| | | | | GGTCACCGTGTCTAGC |
| 1107 | VH of CDH19 | artificial | AA | QVQLVQSGAEVKKPGASVKVSCKASRYTFTSYYMSWVRQAPGQ |
| | 26D1.1 | | | GLEWMGIIHPSGGDTTYAQKFQGRVTMTGDTSTSTVYMELSSL |
| | | | | RSEDTAVYYCARGGIKLWLHFDYWGQGTLVTVSS |
| 1108 | VL of CDH19 | artificial | NT | CATTCCGTGCTGACCCAGTCTCCTTCCGCCTCCGGCACCCCTG |
| | 26D1.1 | | | GCCAGCGCGTGACCATCTCCTGCTCCGGCTCCCGGTCCAACAT |
| | | | | CGGCTCCAACTTCGTGAACTGGTATCAGCAGCTGCCCGGCACC |
| | | | | GCCCCCAAGCTGCTGATCTACACCAACAACCAGCGGCCCTCCG |
| | | | | GCGTGCCCGACCGGTTCTCTGGCTCCAAGTCTGGCACCTCCGC |
| | | | | CTCCCTGGCCATCTCCGGCCTGCAGTCTGAGGACGAGGCCGAC |
| | | | | TACTACTGTGCCGTGTGGGACGACTCCCTGAACGGCTGGGTGT |
| | | | | TCGGCGGAGGCACCAAGCTGACCGTGCTG |
| 1109 | VL of CDH19 | artificial | AA | HSVLTQSPSASGTPGQRVTISCSGSRSNIGSNFVNWYQQLPGT |
| | 26D1.1 | | | APKLLIYTNNQRPSGVPDRFSGSKSGTSASLAISGLQSEDEAD |
| | | | | YYCAVWDDSLNGWVFGGGTKLTVL |
| 1110 | VH-VL of | artificial | NT | CAGGTGCAGCTGGTGCAGTCTGGCGCCGAAGTGAAGAAACCTG |
| | CDH19 26D1.1 | | | GCGCCTCCGTGAAGGTGTCCTGCAAGGCCTCCCGGTACACCTT |
| | | | | CACCAGCTACTACATGTCCTGGGTCCGACAGGCCCCAGGCCAG |
| | | | | GGCCTGGAATGGATGGGCATCATCCACCCCTCTGGCGGCGACA |
| | | | | CCACCTACGCCCAGAAATTCCAGGGCAGAGTGACCATGACCGG |
| | | | | CGACACCTCCACCTCCACCGTGTATATGGAACTGTCCTCCCTG |
| | | | | CGGAGCGAGGACACCGCCGTGTACTACTGCGCCAGAGGCGGCA |
| | | | | TCAAGCTGTGGCTGCACTTCGACTACTGGGGCCAGGGCACCCT |
| | | | | GGTCACCGTGTCTAGCGGAGGCGGAGGATCTGGTGGCGGTGGT |
| | | | | TCTGGCGGCGGAGGCTCCCATTCCGTGCTGACCCAGTCTCCTT |
| | | | | CCGCCTCCGGCACCCCTGGCCAGCGCGTGACCATCTCCTGCTC |
| | | | | CGGCTCCCGGTCCAACATCGGCTCCAACTTCGTGAACTGGTAT |
| | | | | CAGCAGCTGCCCGGCACCGCCCCCAAGCTGCTGATCTACACCA |
| | | | | ACAACCAGCGGCCCTCCGGCGTGCCCGACCGGTTCTCTGGCTC |
| | | | | CAAGTCTGGCACCTCCGCCTCCCTGGCCATCTCCGGCCTGCAG |
| | | | | TCTGAGGACGAGGCCGACTACTACTGTGCCGTGTGGGACGACT |
| | | | | CCCTGAACGGCTGGGTGTTCGGCGGAGGCACCAAGCTGACCGT |
| | | | | GCTG |
| 1111 | VH-VL of | artificial | AA | QVQLVQSGAEVKKPGASVKVSCKASRYTFTSYYMSWVRQAPGQ |
| | CDH19 26D1.1 | | | GLEWMGIIHPSGGDTTYAQKFQGRVTMTGDTSTSTVYMELSSL |
| | | | | RSEDTAVYYCARGGIKLWLHFDYWGQGTLVTVSSGGGGSGGGG |
| | | | | SGGGGSHSVLTQSPSASGTPGQRVTISCSGSRSNIGSNFVNWY |
| | | | | QQLPGTAPKLLIYTNNQRPSGVPDRFSGSKSGTSASLAISGLQ |
| | | | | SEDEADYYCAVWDDSLNGWVFGGGTKLTVL |
| 1112 | CDH19 26D1.1 | artificial | | QVQLVQSGAEVKKPGASVKVSCKASRYTFTSYYMSWVRQAPGQ |
| | x I2C | | | GLEWMGIIHPSGGDTTYAQKFQGRVTMTGDTSTSTVYMELSSL |
| | | | | RSEDTAVYYCARGGIKLWLHFDYWGQGTLVTVSSGGGGSGGGG |
| | | | | SGGGGSHSVLTQSPSASGTPGQRVTISCSGSRSNIGSNFVNWY |
| | | | | QQLPGTAPKLLIYTNNQRPSGVPDRFSGSKSGTSASLAISGLQ |
| | | | | SEDEADYYCAVWDDSLNGWVFGGGTKLTVLSGGGGSEVQLVES |
| | | | | GGGLVQPGGSLKLSCAASGFTFNKYAMNWVRQAPGKGLEWVAR |
| | | | | IRSKYNNYATYYADSVKDRFTISRDDSKNTAYLQMNNLKTEDT |
| | | | | AVYYCVRHGNFGNSYISYWAYWGQGTLVTVSSGGGGSGGGGSG |
| | | | | GGGSQTVVTQEPSLTVSPGGTVTLTCGSSTGAVTSGNYPNWVQ |
| | | | | QKPGQAPRGLIGGTKFLAPGTPARFSGSLLGGKAALTLSGVQP |
| | | | | EDEAEYYCVLWYSNRWVFGGGTKLTVLHHHHHH |
| 1113 | CDR-H1 of | artificial | AA | NYYMS |
| | CDH19 | | | |
| | 26F12.1 | | | |
| 1114 | CDR-H2 of | artificial | AA | IINPSGGDSTYAQKFQG |
| | CDH19 | | | |
| | 26F12.1 | | | |
| 1115 | CDR-H3 of | artificial | AA | GGIQLWLHFDY |
| | CDH19 | | | |
| | 26F12.1 | | | |
| 1116 | CDR-L1 of | artificial | AA | SGSRSNIGSNFVN |
| | CDH19 | | | |
| | 26F12.1 | | | |
| 1117 | CDR-L2 of | artificial | AA | TNYQRPS |
| | CDH19 | | | |
| | 26F12.1 | | | |
| 1118 | CDR-L3 of | artificial | AA | AVWDDSLNGWV |
| | CDH19 | | | |
| | 26F12.1 | | | |
| 1119 | VH of CDH19 | artificial | NT | CAGGTGCAGCTGGTGCAGTCTGGCGCCGAAGTGAAGAAACCTG |
| | 26F12.1 | | | GCGCCTCCGTGAAGGTGTCCTGCAAGGCCTCCCGGTACACCTT |
| | | | | CACCAACTACTACATGTCCTGGGTCCGACAGGCCCCAGGCCAG |
| | | | | GGCCTGGAATGGATGGGCATCATCAACCCCTCTGGCGGCGACT |
| | | | | CCACCTACGCCCAGAAGTTCCAGGGCCGGCTGACCATGACCGG |
| | | | | CGACACCTCCACCTCCACCGTGTATATGGAACTGTCCTCCCTG |
| | | | | CGGAGCGAGGACACCGCCGTGTACTACTGCGCCAGAGGCGGCA |
| | | | | TCCAGCTGTGGCTGCACTTCGACTACTGGGGCCAGGGCACCCT |
| | | | | GGTCACCGTGTCTAGC |
| 1120 | VH of CDH19 | artificial | AA | QVQLVQSGAEVKKPGASVKVSCKASRYTFTNYYMSWVRQAPGQ |
| | 26F12.1 | | | GLEWMGIINPSGGDSTYAQKFQGRLTMTGDTSTSTVYMELSSL |
| | | | | RSEDTAVYYCARGGIQLWLHFDYWGQGTLVTVSS |
| 1121 | VL of CDH19 | artificial | NT | CAGTCTGTGCTGACCCAGTCCCCTTCCGCCTCTGGCACCCCTG |
| | 26F12.1 | | | GCCAGAAAGTGACCATCTCCTGCTCCGGCTCCCGGTCCAACAT |
| | | | | CGGCTCCAACTTCGTGAACTGGTATCAGCAGCTGCCCGGCACC |
| | | | | GCCCCCAAGCTGCTGATCTACACCAACTACCAGCGGCCCTCCG |
| | | | | GCGTGCCCGACCGGTTCTCTGGCTCCAAGTCTGGCACCTCCGC |
| | | | | CTCCCTGGCCATCTCCGGCCTGCAGTCTGAGGACGAGGCCGAC |
| | | | | TACTACTGTGCCGTGTGGGACGACTCCCTGAACGGCTGGGTGT |
| | | | | TCGGCGGAGGCACCAAGCTGACCGTGCTG |
| 1122 | VL of CDH19 | artificial | AA | QSVLTQSPSASGTPGQKVTISCSGSRSNIGSNFVNWYQQLPGT |
| | 26F12.1 | | | APKLLIYTNYQRPSGVPDRFSGSKSGTSASLAISGLQSEDEAD |
| | | | | YYCAVWDDSLNGWVFGGGTKLTVL |
| 1123 | VH-VL of | artificial | NT | CAGGTGCAGCTGGTGCAGTCTGGCGCCGAAGTGAAGAAACCTG |
| | CDH19 | | | GCGCCTCCGTGAAGGTGTCCTGCAAGGCCTCCCGGTACACCTT |
| | 26F12.1 | | | CACCAACTACTACATGTCCTGGGTCCGACAGGCCCCAGGCCAG |
| | | | | GGCCTGGAATGGATGGGCATCATCAACCCCTCTGGCGGCGACT |
| | | | | CCACCTACGCCCAGAAGTTCCAGGGCCGGCTGACCATGACCGG |
| | | | | CGACACCTCCACCTCCACCGTGTATATGGAACTGTCCTCCCTG |
| | | | | CGGAGCGAGGACACCGCCGTGTACTACTGCGCCAGAGGCGGCA |
| | | | | TCCAGCTGTGGCTGCACTTCGACTACTGGGGCCAGGGCACCCT |
| | | | | GGTCACCGTGTCTAGCGGAGGCGGAGGATCTGGTGGCGGTGGT |
| | | | | TCTGGCGGCGGAGGCTCCCAGTCTGTGCTGACCCAGTCCCCTT |
| | | | | CCGCCTCTGGCACCCCTGGCCAGAAAGTGACCATCTCCTGCTC |
| | | | | CGGCTCCCGGTCCAACATCGGCTCCAACTTCGTGAACTGGTAT |
| | | | | CAGCAGCTGCCCGGCACCGCCCCCAAGCTGCTGATCTACACCA |
| | | | | ACTACCAGCGGCCCTCCGGCGTGCCCGACCGGTTCTCTGGCTC |
| | | | | CAAGTCTGGCACCTCCGCCTCCCTGGCCATCTCCGGCCTGCAG |
| | | | | TCTGAGGACGAGGCCGACTACTACTGTGCCGTGTGGGACGACT |
| | | | | CCCTGAACGGCTGGGTGTTCGGCGGAGGCACCAAGCTGACCGT |
| | | | | GCTG |
| 1124 | VH-VL of | artificial | AA | QVQLVQSGAEVKKPGASVKVSCKASRYTFTNYYMSWVRQAPGQ |
| | CDH19 | | | GLEWMGIINPSGGDSTYAQKFQGRLTMTGDTSTSTVYMELSSL |
| | 26F12.1 | | | RSEDTAVYYCARGGIQLWLHFDYWGQGTLVTVSSGGGGSGGGG |
| | | | | SGGGGSQSVLTQSPSASGTPGQKVTISCSGSRSNIGSNFVNWY |
| | | | | QQLPGTAPKLLIYTNYQRPSGVPDRFSGSKSGTSASLAISGLQ |
| | | | | SEDEADYYCAVWDDSLNGWVFGGGTKLTVL |
| 1125 | CDH19 | artificial | | QVQLVQSGAEVKKPGASVKVSCKASRYTFTNYYMSWVRQAPGQ |
| | 26F12.1 x I2C | | | GLEWMGIINPSGGDSTYAQKFQGRLTMTGDTSTSTVYMELSSL |
| | | | | RSEDTAVYYCARGGIQLWLHFDYWGQGTLVTVSSGGGGSGGGG |
| | | | | SGGGGSQSVLTQSPSASGTPGQKVTISCSGSRSNIGSNFVNWY |
| | | | | QQLPGTAPKLLIYTNYQRPSGVPDRFSGSKSGTSASLAISGLQ |
| | | | | SEDEADYYCAVWDDSLNGWVFGGGTKLTVLSGGGGSEVQLVES |
| | | | | GGGLVQPGGSLKLSCAASGFTFNKYAMNWVRQAPGKGLEWVAR |
| | | | | IRSKYNNYATYYADSVKDRFTISRDDSKNTAYLQMNNLKTEDT |
| | | | | AVYYCVRHGNFGNSYISYWAYWGQGTLVTVSSGGGGSGGGGSG |
| | | | | GGGSQTVVTQEPSLTVSPGGTVTLTCGSSTGAVTSGNYPNWVQ |
| | | | | QKPGQAPRGLIGGTKFLAPGTPARFSGSLLGGKAALTLSGVQP |
| | | | | EDEAEYYCVLWYSNRWVFGGGTKLTVLHHHHHH |
| 1126 | CDR-H1 of | artificial | AA | GYYWS |
| | CDH19 4A9 | | | |
| 1127 | CDR-H2 of | artificial | AA | YFSYSGSTNYNPSLKS |
| | CDH19 4A9 | | | |
| 1128 | CDR-H3 of | artificial | AA | NWAFHFDF |
| | CDH19 4A9 | | | |
| 1129 | CDR-L1 of | artificial | AA | TGSSSNIGTGYAVH |
| | CDH19 4A9 | | | |
| 1130 | CDR-L2 of | artificial | AA | GNNNRPS |
| | CDH19 4A9 | | | |
| 1131 | CDR-L3 of | artificial | AA | QSYDSRLSGWV |
| | CDH19 4A9 | | | |
| 1132 | VH of CDH19 | artificial | NT | CAGGTGCAGCTGCAGGAATCCGGCCCTGGCCTGGTCAAGCCCT |
| | 4A9 | | | CCGAGACACTGTCCCTGACCTGCACCGTGTCCGGCGGCTCCAT |
| | | | | CTCCGGCTACTACTGGTCCTGGATCCGGCAGCCCCCTGGCAAG |
| | | | | GGCCTGGAATGGTTCGCCTACTTCTCCTACTCCGGCTCCACCA |
| | | | | ACTACAACCCCAGCCTGAAGTCCAGAGTGACCCTGTCCGTGGA |
| | | | | CACCTCCAAGAACCAGTTCTCCCTGAAGCTGTCCTCCGTGACC |
| | | | | GCCGCTGACACCGCCGTGTACTACTGCGCCCGGAACTGGGCCT |
| | | | | TCCACTTCGATTTCTGGGGCCAGGGCACCCTGGTCACCGTGTC |
| | | | | TAGC |
| 1133 | VH of CDH19 | artificial | AA | QVQLQESGPGLVKPSETLSLTCTVSGGSISGYYWSWIRQPPGK |
| | 4A9 | | | GLEWFAYFSYSGSTNYNPSLKSRVTLSVDTSKNQFSLKLSSVT |
| | | | | AADTAVYYCARNWAFHFDFWGQGTLVTVSS |
| 1134 | VL of CDH19 | artificial | NT | CAGTCTGTGCTGACCCAGCCTCCCTCTGTGTCTGGCGCCCCTG |
| | 4A9 | | | GCCAGAGAGTGACCATCTCCTGCACCGGCTCCTCCAGCAACAT |
| | | | | CGGCACCGGCTACGCCGTGCACTGGTATCAGCAGTTCCCCGGC |
| | | | | ACCGCCCCCAAGCTGCTGATCTACGGCAACAACAACCGGCCCT |
| | | | | CCGGCGTGCCCGACCGGTTCTCTGGCTCCAAGTCTGGCACCTC |
| | | | | CGCCTCCCTGGCTATCACCGGCCTGCAGGCTGAGGACGAGGCC |
| | | | | GACTACTACTGCCAGTCCTACGACTCCCGGCTGTCCGGCTGGG |
| | | | | TGTTCGGCGGAGGCACCAAGCTGACCGTGCTG |
| 1135 | VL of CDH19 | artificial | AA | QSVLTQPPSVSGAPGQRVTISCTGSSSNIGTGYAVHWYQQFPG |
| | 4A9 | | | TAPKLLIYGNNNRPSGVPDRFSGSKSGTSASLAITGLQAEDEA |
| | | | | DYYCQSYDSRLSGWVFGGGTKLTVL |
| 1136 | VH-VL of | artificial | NT | CAGGTGCAGCTGCAGGAATCCGGCCCTGGCCTGGTCAAGCCCT |
| | CDH19 4A9 | | | CCGAGACACTGTCCCTGACCTGCACCGTGTCCGGCGGCTCCAT |
| | | | | CTCCGGCTACTACTGGTCCTGGATCCGGCAGCCCCCTGGCAAG |
| | | | | GGCCTGGAATGGTTCGCCTACTTCTCCTACTCCGGCTCCACCA |
| | | | | ACTACAACCCCAGCCTGAAGTCCAGAGTGACCCTGTCCGTGGA |
| | | | | CACCTCCAAGAACCAGTTCTCCCTGAAGCTGTCCTCCGTGACC |
| | | | | GCCGCTGACACCGCCGTGTACTACTGCGCCCGGAACTGGGCCT |
| | | | | TCCACTTCGATTTCTGGGGCCAGGGCACCCTGGTCACCGTGTC |
| | | | | TAGCGGAGGCGGAGGATCTGGTGGCGGTGGTTCTGGCGGCGGA |
| | | | | GGCTCCCAGTCTGTGCTGACCCAGCCTCCCTCTGTGTCTGGCG |
| | | | | CCCCTGGCCAGAGAGTGACCATCTCCTGCACCGGCTCCTCCAG |
| | | | | CAACATCGGCACCGGCTACGCCGTGCACTGGTATCAGCAGTTC |
| | | | | CCCGGCACCGCCCCCAAGCTGCTGATCTACGGCAACAACAACC |
| | | | | GGCCCTCCGGCGTGCCCGACCGGTTCTCTGGCTCCAAGTCTGG |
| | | | | CACCTCCGCCTCCCTGGCTATCACCGGCCTGCAGGCTGAGGAC |
| | | | | GAGGCCGACTACTACTGCCAGTCCTACGACTCCCGGCTGTCCG |
| | | | | GCTGGGTGTTCGGCGGAGGCACCAAGCTGACCGTGCTG |
| 1137 | VH-VL of | artificial | AA | QVQLQESGPGLVKPSETLSLTCTVSGGSISGYYWSWIRQPPGK |
| | CDH19 4A9 | | | GLEWFAYFSYSGSTNYNPSLKSRVTLSVDTSKNQFSLKLSSVT |
| | | | | AADTAVYYCARNWAFHFDFWGQGTLVTVSSGGGGSGGGGSGGG |
| | | | | GSQSVLTQPPSVSGAPGQRVTISCTGSSSNIGTGYAVHWYQQF |
| | | | | PGTAPKLLIYGNNNRPSGVPDRFSGSKSGTSASLAITGLQAED |
| | | | | EADYYCQSYDSRLSGWVFGGGTKLTVL |
| 1138 | CDH19 4A9 x | artificial | | QVQLQESGPGLVKPSETLSLTCTVSGGSISGYYWSWIRQPPGK |
| | I2C | | | GLEWFAYFSYSGSTNYNPSLKSRVTLSVDTSKNQFSLKLSSVT |
| | | | | AADTAVYYCARNWAFHFDFWGQGTLVTVSSGGGGSGGGGSGGG |
| | | | | GSQSVLTQPPSVSGAPGQRVTISCTGSSSNIGTGYAVHWYQQF |
| | | | | PGTAPKLLIYGNNNRPSGVPDRFSGSKSGTSASLAITGLQAED |
| | | | | EADYYCQSYDSRLSGWVFGGGTKLTVLSGGGGSEVQLVESGGG |
| | | | | LVQPGGSLKLSCAASGFTFNKYAMNWVRQAPGKGLEWVARIRS |
| | | | | KYNNYATYYADSVKDRFTISRDDSKNTAYLQMNNLKTEDTAVY |
| | | | | YCVRHGNFGNSYISYWAYWGQGTLVTVSSGGGGSGGGGSGGGG |
| | | | | SQTVVTQEPSLTVSPGGTVTLTCGSSTGAVTSGNYPNWVQQKP |
| | | | | GQAPRGLIGGTKFLAPGTPARFSGSLLGGKAALTLSGVQPEDE |
| | | | | AEYYCVLWYSNRWVFGGGTKLTVLHHHHHH |
| 1139 | CDR-H1 of | artificial | AA | SYDMH |
| | CDH19 4B10 | | | |
| 1140 | CDR-H2 of | artificial | AA | VISYDGTNEYYADSVKG |
| | CDH19 4B10 | | | |
| 1141 | CDR-H3 of | artificial | AA | ERYFDWSFDY |
| | CDH19 4B10 | | | |
| 1142 | CDR-L1 of | artificial | AA | RASQSVSNTYLA |
| | CDH19 4B10 | | | |
| 1143 | CDR-L2 of | artificial | AA | GASSRAT |
| | CDH19 4B10 | | | |
| 1144 | CDR-L3 of | artificial | AA | QQYSNSWT |
| | CDH19 4B10 | | | |
| 1145 | VH of CDH19 | artificial | NT | CAGGTGCAGCTGGTGGAATCCGGCGGAGGCGTGGTGCAGCCTG |
| | 4B10 | | | GCCGGTCCCTGAGACTGTCTTGCGCCGCCTCCGGCTTCACCTT |
| | | | | CTCCAGCTACGACATGCACTGGGTCCGACAGGCCCCTGGCAAG |
| | | | | GGCCTGGAATGGGTGGCCGTGATCTCCTACGACGGCACCAACG |
| | | | | AGTACTACGCCGACTCCGTGAAGGGCCGGTTCACCATCTCCCG |
| | | | | GGACACCTCCAAGAACACCCTGTACCTGCAGATGAACTCCCTG |
| | | | | CGGGCCGAGGACACCGCCGTGTACTACTGCGCCAGAGAGCGGT |
| | | | | ACTTCGACTGGTCCTTCGACTACTGGGGCCAGGGCACCCTGGT |
| | | | | GTCCGTGTCTAGC |
| 1146 | VH of CDH19 | artificial | AA | QVQLVESGGGVVQPGRSLRLSCAASGFTFSSYDMHWVRQAPGK |
| | 4B10 | | | GLEWVAVISYDGTNEYYADSVKGRFTISRDTSKNTLYLQMNSL |
| | | | | RAEDTAVYYCARERYFDWSFDYWGQGTLVSVSS |
| 1147 | VL of CDH19 | artificial | NT | GAGATCGTGCTGACCCAGTCCCCTGGCACCCTGTCCCTGAGCC |
| | 4B10 | | | CTGGCGAGAGAGCCACCCTGTCTTGCCGGGCCTCCCAGTCCGT |
| | | | | GTCCAACACCTACCTGGCCTGGTATCACCAGCGCCCTGGCCAG |
| | | | | GCCCCTCGGCTGCTGATCTACGGCGCCTCTTCCAGAGCCACCG |
| | | | | GCATCCCTGACCGGTTCTCCGGCTCTGGCTCTGGCACCGACTT |
| | | | | CGCCCTGACCATCTCCAGCCTGGAACCCGAGGATTTCGCTGTG |
| | | | | TACTATTGCCAGCAGTACTCCAACTCCTGGACCTTCGGACAGG |
| | | | | GCACCAAGGTGGAAATCAAG |
| 1148 | VL of CDH19 | artificial | AA | EIVLTQSPGTLSLSPGERATLSCRASQSVSNTYLAWYHQRPGQ |
| | 4B10 | | | APRLLIYGASSRATGIPDRFSGSGSGTDFALTISSLEPEDFAV |
| | | | | YYCQQYSNSWTFGQGTKVEIK |
| 1149 | VH-VL of | artificial | NT | CAGGTGCAGCTGGTGGAATCCGGCGGAGGCGTGGTGCAGCCTG |
| | CDH19 4B10 | | | GCCGGTCCCTGAGACTGTCTTGCGCCGCCTCCGGCTTCACCTT |
| | | | | CTCCAGCTACGACATGCACTGGGTCCGACAGGCCCCTGGCAAG |
| | | | | GGCCTGGAATGGGTGGCCGTGATCTCCTACGACGGCACCAACG |
| | | | | AGTACTACGCCGACTCCGTGAAGGGCCGGTTCACCATCTCCCG |
| | | | | GGACACCTCCAAGAACACCCTGTACCTGCAGATGAACTCCCTG |
| | | | | CGGGCCGAGGACACCGCCGTGTACTACTGCGCCAGAGAGCGGT |
| | | | | ACTTCGACTGGTCCTTCGACTACTGGGGCCAGGGCACCCTGGT |
| | | | | GTCCGTGTCTAGCGGAGGCGGAGGATCTGGTGGCGGTGGTTCT |
| | | | | GGCGGCGGAGGCTCCGAGATCGTGCTGACCCAGTCCCCTGGCA |
| | | | | CCCTGTCCCTGAGCCCTGGCGAGAGAGCCACCCTGTCTTGCCG |
| | | | | GGCCTCCCAGTCCGTGTCCAACACCTACCTGGCCTGGTATCAC |
| | | | | CAGCGCCCTGGCCAGGCCCCTCGGCTGCTGATCTACGGCGCCT |
| | | | | CTTCCAGAGCCACCGGCATCCCTGACCGGTTCTCCGGCTCTGG |
| | | | | CTCTGGCACCGACTTCGCCCTGACCATCTCCAGCCTGGAACCC |
| | | | | GAGGATTTCGCTGTGTACTATTGCCAGCAGTACTCCAACTCCT |
| | | | | GGACCTTCGGACAGGGCACCAAGGTGGAAATCAAG |
| 1150 | VH-VL of | artificial | AA | QVQLVESGGGVVQPGRSLRLSCAASGFTFSSYDMHWVRQAPGK |
| | CDH19 4B10 | | | GLEWVAVISYDGTNEYYADSVKGRFTISRDTSKNTLYLQMNSL |
| | | | | RAEDTAVYYCARERYFDWSFDYWGQGTLVSVSSGGGGSGGGGS |
| | | | | GGGGSEIVLTQSPGTLSLSPGERATLSCRASQSVSNTYLAWYH |
| | | | | QRPGQAPRLLIYGASSRATGIPDRFSGSGSGTDFALTISSLEP |
| | | | | EDFAVYYCQQYSNSWTFGQGTKVEIK |
| 1151 | CDH19 4B10 x | artificial | | QVQLVESGGGVVQPGRSLRLSCAASGFTFSSYDMHWVRQAPGK |
| | I2C | | | GLEWVAVISYDGTNEYYADSVKGRFTISRDTSKNTLYLQMNSL |
| | | | | RAEDTAVYYCARERYFDWSFDYWGQGTLVSVSSGGGGSGGGGS |
| | | | | GGGGSEIVLTQSPGTLSLSPGERATLSCRASQSVSNTYLAWYH |
| | | | | QRPGQAPRLLIYGASSRATGIPDRFSGSGSGTDFALTISSLEP |
| | | | | EDFAVYYCQQYSNSWTFGQGTKVEIKSGGGGSEVQLVESGGGL |
| | | | | VQPGGSLKLSCAASGFTFNKYAMNWVRQAPGKGLEWVARIRSK |
| | | | | YNNYATYYADSVKDRFTISRDDSKNTAYLQMNNLKTEDTAVYY |
| | | | | CVRHGNFGNSYISYWAYWGQGTLVTVSSGGGGSGGGGSGGGGS |
| | | | | QTVVTQEPSLTVSPGGTVTLTCGSSTGAVTSGNYPNWVQQKPG |
| | | | | QAPRGLIGGTKFLAPGTPARFSGSLLGGKAALTLSGVQPEDEA |
| | | | | EYYCVLWYSNRWVFGGGTKLTVLHHHHHH |
| 1152 | CDR-H1 of | artificial | AA | SYDMD |
| | CDH19 4F3 | | | |
| 1153 | CDR-H2 of | artificial | AA | VIWYDGSNKYYADSVRG |
| | CDH19 4F3 | | | |
| 1154 | CDR-H3 of | artificial | AA | ETGEGWYFDL |
| | CDH19 4F3 | | | |
| 1155 | CDR-L1 of | artificial | AA | RASQSVSSSYLA |
| | CDH19 4F3 | | | |
| 1156 | CDR-L2 of | artificial | AA | GASSRAT |
| | CDH19 4F3 | | | |
| 1157 | CDR-L3 of | artificial | AA | QQYGSSWT |
| | CDH19 4F3 | | | |
| 1158 | VH of CDH19 | artificial | NT | CAGGTGCAGCTGGTGGAATCCGGCGGAGGCGTGGTGCAGCCTG |
| | 4F3 | | | GCCGGTCCCTGAGACTGTCTTGTGCCGCCTCCGGCTTCAGCTT |
| | | | | CTCCTCCTACGACATGGACTGGGTCCGACAGACCCCCGGCAAG |
| | | | | GGCCTGGAATGGGTGGCCGTGATTTGGTACGACGGCTCCAACA |
| | | | | AGTACTACGCCGACTCCGTGCGGGGCAGATTCACCATCTCCCG |
| | | | | GGACAACTCCAAGAACACCCTGTTTCTGCAGATGAACTCCCTG |
| | | | | CGGGTGGAAGATACCGCCGTGTACTACTGCGCCAGAGAGACAG |
| | | | | GCGAGGGCTGGTACTTCGACCTGTGGGGCAGAGGCACCCTGGT |
| | | | | CACCGTGTCTAGC |
| 1159 | VH of CDH19 | artificial | AA | QVQLVESGGGVVQPGRSLRLSCAASGFSFSSYDMDWVRQTPGK |
| | 4F3 | | | GLEWVAVIWYDGSNKYYADSVRGRFTISRDNSKNTLFLQMNSL |
| | | | | RVEDTAVYYCARETGEGWYFDLWGRGTLVTVSS |
| 1160 | VL of CDH19 | artificial | NT | GAGATCGTGCTGACCCAGTCCCCTGGCACCCTGTCCCTGAGCC |
| | 4F3 | | | CTGGCGAGAGAGCCACCCTGTCCTGCAGAGCCTCCCAGTCCGT |
| | | | | GTCCTCCTCCTACCTGGCCTGGTATCAGCAGAAGCCCGGCCAG |
| | | | | GCCCCTCGGCTGCTGATCTACGGCGCCTCTTCCAGAGCCACCG |
| | | | | GCATCCCTGACCGGTTCTCCGGCTCTGGCTCCGGCACCGACTT |
| | | | | CACCCTGACCATCAGCCGGCTGGAACCCGAGGACTTCGCTGTG |
| | | | | TACTATTGCCAGCAGTACGGCTCCTCCTGGACCTTCGGCCAGG |
| | | | | GCACCAAGGTGGAAATCAAG |
| 1161 | VL of CDH19 | artificial | AA | EIVLTQSPGTLSLSPGERATLSCRASQSVSSSYLAWYQQKPGQ |
| | 4F3 | | | APRLLIYGASSRATGIPDRFSGSGSGTDFTLTISRLEPEDFAV |
| | | | | YYCQQYGSSWTFGQGTKVEIK |
| 1162 | VH-VL of | artificial | NT | CAGGTGCAGCTGGTGGAATCCGGCGGAGGCGTGGTGCAGCCTG |
| | CDH19 4F3 | | | GCCGGTCCCTGAGACTGTCTTGTGCCGCCTCCGGCTTCAGCTT |
| | | | | CTCCTCCTACGACATGGACTGGGTCCGACAGACCCCCGGCAAG |
| | | | | GGCCTGGAATGGGTGGCCGTGATTTGGTACGACGGCTCCAACA |
| | | | | AGTACTACGCCGACTCCGTGCGGGGCAGATTCACCATCTCCCG |
| | | | | GGACAACTCCAAGAACACCCTGTTTCTGCAGATGAACTCCCTG |
| | | | | CGGGTGGAAGATACCGCCGTGTACTACTGCGCCAGAGAGACAG |
| | | | | GCGAGGGCTGGTACTTCGACCTGTGGGGCAGAGGCACCCTGGT |
| | | | | CACCGTGTCTAGCGGAGGCGGAGGATCTGGTGGCGGTGGTTCT |
| | | | | GGCGGCGGAGGCTCCGAGATCGTGCTGACCCAGTCCCCTGGCA |
| | | | | CCCTGTCCCTGAGCCCTGGCGAGAGAGCCACCCTGTCCTGCAG |
| | | | | AGCCTCCCAGTCCGTGTCCTCCTCCTACCTGGCCTGGTATCAG |
| | | | | CAGAAGCCCGGCCAGGCCCCTCGGCTGCTGATCTACGGCGCCT |
| | | | | CTTCCAGAGCCACCGGCATCCCTGACCGGTTCTCCGGCTCTGG |
| | | | | CTCCGGCACCGACTTCACCCTGACCATCAGCCGGCTGGAACCC |
| | | | | GAGGACTTCGCTGTGTACTATTGCCAGCAGTACGGCTCCTCCT |
| | | | | GGACCTTCGGCCAGGGCACCAAGGTGGAAATCAAG |
| 1163 | VH-VL of | artificial | AA | QVQLVESGGGVVQPGRSLRLSCAASGFSFSSYDMDWVRQTPGK |
| | CDH19 4F3 | | | GLEWVAVIWYDGSNKYYADSVRGRFTISRDNSKNTLFLQMNSL |
| | | | | RVEDTAVYYCARETGEGWYFDLWGRGTLVTVSSGGGGSGGGGS |
| | | | | GGGGSEIVLTQSPGTLSLSPGERATLSCRASQSVSSSYLAWYQ |
| | | | | QKPGQAPRLLIYGASSRATGIPDRFSGSGSGTDFTLTISRLEP |
| | | | | EDFAVYYCQQYGSSWTFGQGTKVEIK |
| 1164 | CDH19 4F3 x | artificial | | QVQLVESGGGVVQPGRSLRLSCAASGFSFSSYDMDWVRQTPGK |
| | I2C | | | GLEWVAVIWYDGSNKYYADSVRGRFTISRDNSKNTLFLQMNSL |
| | | | | RVEDTAVYYCARETGEGWYFDLWGRGTLVTVSSGGGGSGGGGS |
| | | | | GGGGSEIVLTQSPGTLSLSPGERATLSCRASQSVSSSYLAWYQ |
| | | | | QKPGQAPRLLIYGASSRATGIPDRFSGSGSGTDFTLTISRLEP |
| | | | | EDFAVYYCQQYGSSWTFGQGTKVEIKSGGGGSEVQLVESGGGL |
| | | | | VQPGGSLKLSCAASGFTFNKYAMNWVRQAPGKGLEWVARIRSK |
| | | | | YNNYATYYADSVKDRFTISRDDSKNTAYLQMNNLKTEDTAVYY |
| | | | | CVRHGNFGNSYISYWAYWGQGTLVTVSSGGGGSGGGGSGGGGS |
| | | | | QTVVTQEPSLTVSPGGTVTLTCGSSTGAVTSGNYPNWVQQKPG |
| | | | | QAPRGLIGGTKFLAPGTPARFSGSLLGGKAALTLSGVQPEDEA |
| | | | | EYYCVLWYSNRWVFGGGTKLTVLHHHHHH |
| 1165 | CDR-H1 of | artificial | AA | SYSWS |
| | CDH19 4F7 | | | |
| 1166 | CDR-H2 of | artificial | AA | YIYYSGSTNYNPSLKS |
| | CDH19 4F7 | | | |
| 1167 | CDR-H3 of | artificial | AA | NWAFHFDY |
| | CDH19 4F7 | | | |
| 1168 | CDR-L1 of | artificial | AA | TGSSSNIGTGYDVH |
| | CDH19 4F7 | | | |
| 1169 | CDR-L2 of | artificial | AA | GNSNRPS |
| | CDH19 4F7 | | | |
| 1170 | CDR-L3 of | artificial | AA | QSYDSSLSGWV |
| | CDH19 4F7 | | | |
| 1171 | VH of CDH19 | artificial | NT | CAGGTGCAGCTGCAGGAATCCGGCCCTGGCCTGGTCAAGCCCT |
| | 4F7 | | | CCGAGACACTGTCCCTGACCTGCACCGTGTCCGGCGGCTCCAT |
| | | | | CTCCTCCTACTCTTGGTCCTGGATCCGGCAGCCCCCTGGCAAG |
| | | | | GGCCTGGAATGGATCGGCTACATCTACTACTCCGGCTCCACCA |
| | | | | ACTACAACCCCAGCCTGAAGTCCAGAGTGACCATCTCCCTGGA |
| | | | | CACCTCCAAGAACCAGTTCTCCCTGAAGCTGTCCTCCGTGACC |
| | | | | GCCGCTGACACCGCCGTGTACTACTGCGCCCGGAACTGGGCCT |
| | | | | TCCACTTCGACTACTGGGGCCAGGGCACCCTGGTCACCGTGTC |
| | | | | TAGC |
| 1172 | VH of CDH19 | artificial | AA | QVQLQESGPGLVKPSETLSLTCTVSGGSISSYSWSWIRQPPGK |
| | 4F7 | | | GLEWIGYIYYSGSTNYNPSLKSRVTISLDTSKNQFSLKLSSVT |
| | | | | AADTAVYYCARNWAFHFDYWGQGTLVTVSS |
| 1173 | VL of CDH19 | artificial | NT | CAGTCTGTGCTGACCCAGCCTCCCTCTGTGTCTGGCGCCCCTG |
| | 4F7 | | | GCCAGCGCGTGACCATTTCCTGCACCGGCTCCTCCAGCAACAT |
| | | | | CGGCACCGGCTACGACGTGCACTGGTATCAGCAGCTGCCCGGC |
| | | | | ACCGCCCCCAAGCTGCTGATCCACGGCAACTCCAACCGGCCCT |
| | | | | CCGGCGTGCCCGACCGGTTCTCTGGCTCCAAGTCTGGCACCTC |
| | | | | CGCCTCCCTGGCTATCACCGGCCTGCAGGCTGAGGACGAGGCC |
| | | | | GACTACTACTGCCAGTCCTACGACTCCTCCCTGTCCGGCTGGG |
| | | | | TGTTCGGCGGAGGCACCAGACTGACCGTGCTG |
| 1174 | VL of CDH19 | artificial | AA | QSVLTQPPSVSGAPGQRVTISCTGSSSNIGTGYDVHWYQQLPG |
| | 4F7 | | | TAPKLLIHGNSNRPSGVPDRFSGSKSGTSASLAITGLQAEDEA |
| | | | | DYYCQSYDSSLSGWVFGGGTRLTVL |
| 1175 | VH-VL of | artificial | NT | CAGGTGCAGCTGCAGGAATCCGGCCCTGGCCTGGTCAAGCCCT |
| | CDH19 4F7 | | | CCGAGACACTGTCCCTGACCTGCACCGTGTCCGGCGGCTCCAT |
| | | | | CTCCTCCTACTCTTGGTCCTGGATCCGGCAGCCCCCTGGCAAG |
| | | | | GGCCTGGAATGGATCGGCTACATCTACTACTCCGGCTCCACCA |
| | | | | ACTACAACCCCAGCCTGAAGTCCAGAGTGACCATCTCCCTGGA |
| | | | | CACCTCCAAGAACCAGTTCTCCCTGAAGCTGTCCTCCGTGACC |
| | | | | GCCGCTGACACCGCCGTGTACTACTGCGCCCGGAACTGGGCCT |
| | | | | TCCACTTCGACTACTGGGGCCAGGGCACCCTGGTCACCGTGTC |
| | | | | TAGCGGAGGCGGAGGATCTGGTGGCGGTGGTTCTGGCGGCGGA |
| | | | | GGCTCCCAGTCTGTGCTGACCCAGCCTCCCTCTGTGTCTGGCG |
| | | | | CCCCTGGCCAGCGCGTGACCATTTCCTGCACCGGCTCCTCCAG |
| | | | | CAACATCGGCACCGGCTACGACGTGCACTGGTATCAGCAGCTG |
| | | | | CCCGGCACCGCCCCCAAGCTGCTGATCCACGGCAACTCCAACC |
| | | | | GGCCCTCCGGCGTGCCCGACCGGTTCTCTGGCTCCAAGTCTGG |
| | | | | CACCTCCGCCTCCCTGGCTATCACCGGCCTGCAGGCTGAGGAC |
| | | | | GAGGCCGACTACTACTGCCAGTCCTACGACTCCTCCCTGTCCG |
| | | | | GCTGGGTGTTCGGCGGAGGCACCAGACTGACCGTGCTG |
| 1176 | VH-VL of | artificial | AA | QVQLQESGPGLVKPSETLSLTCTVSGGSISSYSWSWIRQPPGK |
| | CDH19 4F7 | | | GLEWIGYIYYSGSTNYNPSLKSRVTISLDTSKNQFSLKLSSVT |
| | | | | AADTAVYYCARNWAFHFDYWGQGTLVTVSSGGGGSGGGGSGGG |
| | | | | GSQSVLTQPPSVSGAPGQRVTISCTGSSSNIGTGYDVHWYQQL |
| | | | | PGTAPKLLIHGNSNRPSGVPDRFSGSKSGTSASLAITGLQAED |
| | | | | EADYYCQSYDSSLSGWVFGGGTRLTVL |
| 1177 | CDH19 4F7 x | artificial | | QVQLQESGPGLVKPSETLSLTCTVSGGSISSYSWSWIRQPPGK |
| | I2C | | | GLEWIGYIYYSGSTNYNPSLKSRVTISLDTSKNQFSLKLSSVT |
| | | | | AADTAVYYCARNWAFHFDYWGQGTLVTVSSGGGGSGGGGSGGG |
| | | | | GSQSVLTQPPSVSGAPGQRVTISCTGSSSNIGTGYDVHWYQQL |
| | | | | PGTAPKLLIHGNSNRPSGVPDRFSGSKSGTSASLAITGLQAED |
| | | | | EADYYCQSYDSSLSGWVFGGGTRLTVLSGGGGSEVQLVESGGG |
| | | | | LVQPGGSLKLSCAASGFTFNKYAMNWVRQAPGKGLEWVARIRS |
| | | | | KYNNYATYYADSVKDRFTISRDDSKNTAYLQMNNLKTEDTAVY |
| | | | | YCVRHGNFGNSYISYWAYWGQGTLVTVSSGGGGSGGGGSGGGG |
| | | | | SQTVVTQEPSLTVSPGGTVTLTCGSSTGAVTSGNYPNWVQQKP |
| | | | | GQAPRGLIGGTKFLAPGTPARFSGSLLGGKAALTLSGVQPEDE |
| | | | | AEYYCVLWYSNRWVFGGGTKLTVLHHHHHH |
| 1178 | CDR-H1 of | artificial | AA | SYGMH |
| | CDH19 14039 | | | |
| 1179 | CDR-H2 of | artificial | AA | FIWYEGSNKYYAESVKD |
| | CDH19 14039 | | | |
| 1180 | CDR-H3 of | artificial | AA | RAGIIGTIGYYYGMDV |
| | CDH19 14039 | | | |
| 1181 | CDR-L1 of | artificial | AA | SGDRLGEKYTS |
| | CDH19 14039 | | | |
| 1182 | CDR-L2 of | artificial | AA | QDTKRPS |
| | CDH19 14039 | | | |
| 1183 | CDR-L3 of | artificial | AA | QAWESSTVV |
| | CDH19 14039 | | | |
| 1184 | VH of CDH19 | artificial | NT | CAGGTGCAGTTGGTGGAGTCTGGGGGAGGCGTGGTCCAGCCTG |
| | 14039 | | | GGGGGTCCCTGAGACTCTCCTGTGCAGCGTCTGGATTCACCTT |
| | | | | CAGTAGCTATGGCATGCACTGGGTCCGCCAGGCTCCAGGCAAG |
| | | | | GGGCTGGAGTGGGTGGCATTTATATGGTATGAGGGAAGTAATA |
| | | | | AATACTATGCAGAGTCCGTGAAGGACCGATTCACCATCTCCAG |
| | | | | AGACAATTCCAAGAACACGCTGTATCTGCAAATGAATAGCCTG |
| | | | | AGAGCTGAGGACACGGCTGTGTATTACTGTGCGAGAAGGGCCG |
| | | | | GTATAATAGGAACTATAGGCTACTACTACGGTATGGACGTCTG |
| | | | | GGGCCAAGGGACCACGGTCACCGTCTCTAGT |
| 1185 | VH of CDH19 | artificial | AA | QVQLVESGGGVVQPGGSLRLSCAASGFTFSSYGMHWVRQAPGK |
| | 14039 | | | GLEWVAFIWYEGSNKYYAESVKDRFTISRDNSKNTLYLQMNSL |
| | | | | RAEDTAVYYCARRAGIIGTIGYYYGMDVWGQGTTVTVSS |
| 1186 | VL of CDH19 | artificial | NT | TCCTATGAACTGACTCAGCCACCCTCAGTGTCCGTGTCCCCAG |
| | 14039 | | | GACAGACAGCCAGCATCACCTGCTCTGGAGATAGGTTGGGGGA |
| | | | | AAAATATACTAGCTGGTATCAGCAGAGGCCAGGCCAGTCCCCT |
| | | | | TTGCTGGTCATCTATCAAGATACCAAGCGGCCCTCAGGGATCC |
| | | | | CTGAGCGATTCTCTGGCTCCAACTCTGGTAACACAGCCACTCT |
| | | | | GACCATCAGCGGGACCCAGGCTATGGATGAGGCTGACTATTAC |
| | | | | TGTCAGGCGTGGGAGAGCAGCACTGTGGTATTCGGCGGAGGGA |
| | | | | CCAAGCTGACCGTCCTA |
| 1187 | VL of CDH19 | artificial | AA | SYELTQPPSVSVSPGQTASITCSGDRLGEKYTSWYQQRPGQSP |
| | 14039 | | | LLVIYQDTKRPSGIPERFSGSNSGNTATLTISGTQAMDEADYY |
| | | | | CQAWESSTVVFGGGTKLTVL |
| 1188 | VH-VL of | artificial | NT | CAGGTGCAGTTGGTGGAGTCTGGGGGAGGCGTGGTCCAGCCTG |
| | CDH19 14039 | | | GGGGGTCCCTGAGACTCTCCTGTGCAGCGTCTGGATTCACCTT |
| | | | | CAGTAGCTATGGCATGCACTGGGTCCGCCAGGCTCCAGGCAAG |
| | | | | GGGCTGGAGTGGGTGGCATTTATATGGTATGAGGGAAGTAATA |
| | | | | AATACTATGCAGAGTCCGTGAAGGACCGATTCACCATCTCCAG |
| | | | | AGACAATTCCAAGAACACGCTGTATCTGCAAATGAATAGCCTG |
| | | | | AGAGCTGAGGACACGGCTGTGTATTACTGTGCGAGAAGGGCCG |
| | | | | GTATAATAGGAACTATAGGCTACTACTACGGTATGGACGTCTG |
| | | | | GGGCCAAGGGACCACGGTCACCGTCTCTAGTGGTGGCGGAGGA |
| | | | | TCTGGCGGAGGTGGAAGCGGAGGCGGCGGATCTTCCTATGAAC |
| | | | | TGACTCAGCCACCCTCAGTGTCCGTGTCCCCAGGACAGACAGC |
| | | | | CAGCATCACCTGCTCTGGAGATAGGTTGGGGGAAAAATATACT |
| | | | | AGCTGGTATCAGCAGAGGCCAGGCCAGTCCCCTTTGCTGGTCA |
| | | | | TCTATCAAGATACCAAGCGGCCCTCAGGGATCCCTGAGCGATT |
| | | | | CTCTGGCTCCAACTCTGGTAACACAGCCACTCTGACCATCAGC |
| | | | | GGGACCCAGGCTATGGATGAGGCTGACTATTACTGTCAGGCGT |
| | | | | GGGAGAGCAGCACTGTGGTATTCGGCGGAGGGACCAAGCTGAC |
| | | | | CGTCCTA |
| 1189 | VH-VL of | artificial | AA | QVQLVESGGGVVQPGGSLRLSCAASGFTFSSYGMHWVRQAPGK |
| | CDH19 14039 | | | GLEWVAFIWYEGSNKYYAESVKDRFTISRDNSKNTLYLQMNSL |
| | | | | RAEDTAVYYCARRAGIIGTIGYYYGMDVWGQGTTVTVSSGGGG |
| | | | | SGGGGSGGGGSSYELTQPPSVSVSPGQTASITCSGDRLGEKYT |
| | | | | SWYQQRPGQSPLLVIYQDTKRPSGIPERFSGSNSGNTATLTIS |
| | | | | GTQAMDEADYYCQAWESSTVVFGGGTKLTVL |
| 1190 | CDH19 14039 | artificial | | QVQLVESGGGVVQPGGSLRLSCAASGFTFSSYGMHWVRQAPGK |
| | x I2C | | | GLEWVAFIWYEGSNKYYAESVKDRFTISRDNSKNTLYLQMNSL |
| | | | | RAEDTAVYYCARRAGIIGTIGYYYGMDVWGQGTTVTVSSGGGG |
| | | | | SGGGGSGGGGSSYELTQPPSVSVSPGQTASITCSGDRLGEKYT |
| | | | | SWYQQRPGQSPLLVIYQDTKRPSGIPERFSGSNSGNTATLTIS |
| | | | | GTQAMDEADYYCQAWESSTVVFGGGTKLTVLSGGGGSEVQLVE |
| | | | | SGGGLVQPGGSLKLSCAASGFTFNKYAMNWVRQAPGKGLEWVA |
| | | | | RIRSKYNNYATYYADSVKDRFTISRDDSKNTAYLQMNNLKTED |
| | | | | TAVYYCVRHGNFGNSYISYWAYWGQGTLVTVSSGGGGSGGGGS |
| | | | | GGGGSQTVVTQEPSLTVSPGGTVTLTCGSSTGAVTSGNYPNWV |
| | | | | QQKPGQAPRGLIGGTKFLAPGTPARFSGSLLGGKAALTLSGVQ |
| | | | | PEDEAEYYCVLWYSNRWVFGGGTKLTVLHHHHHH |
| 1191 | CDR-H1 of | artificial | AA | SYGMH |
| | CDH19 14304 | | | |
| 1192 | CDR-H2 of | artificial | AA | FIWYDGSNKYYADSVKD |
| | CDH19 14304 | | | |
| 1193 | CDR-H3 of | artificial | AA | RAGIIGTIGYYYGMDV |
| | CDH19 14304 | | | |
| 1194 | CDR-L1 of | artificial | AA | SGDRLGEKYVS |
| | CDH19 14304 | | | |
| 1195 | CDR-L2 of | artificial | AA | QDNKWPS |
| | CDH19 14304 | | | |
| 1196 | CDR-L3 of | artificial | AA | QAWDSSTVV |
| | CDH19 14304 | | | |
| 1197 | VH of CDH19 | artificial | NT | CAGGTGCAGTTGGTGGAGTCTGGGGGAGGCGTGGTCCAGCCTG |
| | 14304 | | | GGGGGTCCCTGAGACTCTCCTGTGCAGCGTCTGGATTCACCTT |
| | | | | CAGTAGCTATGGCATGCACTGGGTCCGCCAGGCTCCAGGCAAG |
| | | | | GGGCTGGAGTGGGTGGCATTTATATGGTATGATGGAAGTAATA |
| | | | | AATACTATGCAGACTCCGTGAAGGACCGATTCACCATCTCCAG |
| | | | | AGACAATTCCAAGAACACGCTGTATCTGCAAATGAAAAGCCTG |
| | | | | AGAGCTGAGGACACGGCTGTGTATTACTGTGCGAGAAGGGCCG |
| | | | | GTATAATAGGAACTATAGGCTACTACTACGGTATGGACGTCTG |
| | | | | GGGCCAAGGGACCACGGTCACCGTCTCTAGT |
| 1198 | VH of CDH19 | artificial | AA | QVQLVESGGGVVQPGGSLRLSCAASGFTFSSYGMHWVRQAPGK |
| | 14304 | | | GLEWVAFIWYDGSNKYYADSVKDRFTISRDNSKNTLYLQMKSL |
| | | | | RAEDTAVYYCARRAGIIGTIGYYYGMDVWGQGTTVTVSS |
| 1199 | VL of CDH19 | artificial | NT | TCCTATGAGCTGACTCAGCCACCCTCAGTGTCCGTGTCCCCAG |
| | 14304 | | | GACAGACAGCCAGCATCACCTGCTCTGGAGATAGATTGGGGGA |
| | | | | GAAATATGTTAGCTGGTATCAGCAGAAGCCAGGCCAGTCCCCT |
| | | | | ATACTGGTCATCTATCAAGATAATAAGTGGCCCTCAGGGATCC |
| | | | | CTGAGCGATTCTCTGGCTCCAACTCTGGGAACACAGCCACTCT |
| | | | | GACCATCAGCGGGACCCAGGCTATGGATGAGGCTGACTATTAC |
| | | | | TGTCAGGCGTGGGACAGCAGCACTGTGGTATTCGGCGGGGGGA |
| | | | | CCAAGCTGACCGTCCTA |
| 1200 | VL of CDH19 | artificial | AA | SYELTQPPSVSVSPGQTASITCSGDRLGEKYVSWYQQKPGQSP |
| | 14304 | | | ILVIYQDNKWPSGIPERFSGSNSGNTATLTISGTQAMDEADYY |
| | | | | CQAWDSSTVVFGGGTKLTVL |
| 1201 | VH-VL of | artificial | NT | CAGGTGCAGTTGGTGGAGTCTGGGGGAGGCGTGGTCCAGCCTG |
| | CDH19 14304 | | | GGGGGTCCCTGAGACTCTCCTGTGCAGCGTCTGGATTCACCTT |
| | | | | CAGTAGCTATGGCATGCACTGGGTCCGCCAGGCTCCAGGCAAG |
| | | | | GGGCTGGAGTGGGTGGCATTTATATGGTATGATGGAAGTAATA |
| | | | | AATACTATGCAGACTCCGTGAAGGACCGATTCACCATCTCCAG |
| | | | | AGACAATTCCAAGAACACGCTGTATCTGCAAATGAAAAGCCTG |
| | | | | AGAGCTGAGGACACGGCTGTGTATTACTGTGCGAGAAGGGCCG |
| | | | | GTATAATAGGAACTATAGGCTACTACTACGGTATGGACGTCTG |
| | | | | GGGCCAAGGGACCACGGTCACCGTCTCTAGTGGTGGCGGAGGA |
| | | | | TCTGGCGGAGGTGGAAGCGGAGGCGGCGGATCTTCCTATGAGC |
| | | | | TGACTCAGCCACCCTCAGTGTCCGTGTCCCCAGGACAGACAGC |
| | | | | CAGCATCACCTGCTCTGGAGATAGATTGGGGGAGAAATATGTT |
| | | | | AGCTGGTATCAGCAGAAGCCAGGCCAGTCCCCTATACTGGTCA |
| | | | | TCTATCAAGATAATAAGTGGCCCTCAGGGATCCCTGAGCGATT |
| | | | | CTCTGGCTCCAACTCTGGGAACACAGCCACTCTGACCATCAGC |
| | | | | GGGACCCAGGCTATGGATGAGGCTGACTATTACTGTCAGGCGT |
| | | | | GGGACAGCAGCACTGTGGTATTCGGCGGGGGGACCAAGCTGAC |
| | | | | CGTCCTA |
| 1202 | VH-VL of | artificial | AA | QVQLVESGGGVVQPGGSLRLSCAASGFTFSSYGMHWVRQAPGK |
| | CDH19 14304 | | | GLEWVAFIWYDGSNKYYADSVKDRFTISRDNSKNTLYLQMKSL |
| | | | | RAEDTAVYYCARRAGIIGTIGYYYGMDVWGQGTTVTVSSGGGG |
| | | | | SGGGGSGGGGSSYELTQPPSVSVSPGQTASITCSGDRLGEKYV |
| | | | | SWYQQKPGQSPILVIYQDNKWPSGIPERFSGSNSGNTATLTIS |
| | | | | GTQAMDEADYYCQAWDSSTVVFGGGTKLTVL |
| 1203 | CDH19 14304 | artificial | | QVQLVESGGGVVQPGGSLRLSCAASGFTFSSYGMHWVRQAPGK |
| | x I2C | | | GLEWVAFIWYDGSNKYYADSVKDRFTISRDNSKNTLYLQMKSL |
| | | | | RAEDTAVYYCARRAGIIGTIGYYYGMDVWGQGTTVTVSSGGGG |
| | | | | SGGGGSGGGGSSYELTQPPSVSVSPGQTASITCSGDRLGEKYV |
| | | | | SWYQQKPGQSPILVIYQDNKWPSGIPERFSGSNSGNTATLTIS |
| | | | | GTQAMDEADYYCQAWDSSTVVFGGGTKLTVLSGGGGSEVQLVE |
| | | | | SGGGLVQPGGSLKLSCAASGFTFNKYAMNWVRQAPGKGLEWVA |
| | | | | RIRSKYNNYATYYADSVKDRFTISRDDSKNTAYLQMNNLKTED |
| | | | | TAVYYCVRHGNFGNSYISYWAYWGQGTLVTVSSGGGGSGGGGS |
| | | | | GGGGSQTVVTQEPSLTVSPGGTVTLTCGSSTGAVTSGNYPNWV |
| | | | | QQKPGQAPRGLIGGTKFLAPGTPARFSGSLLGGKAALTLSGVQ |
| | | | | PEDEAEYYCVLWYSNRWVFGGGTKLTVLHHHHHH |
| 1204 | CDR-H1 of | artificial | AA | SYGMH |
| | CDH19 14301 | | | |
| 1205 | CDR-H2 of | artificial | AA | FIWYDGSNKYYADSVKD |
| | CDH19 14301 | | | |
| 1206 | CDR-H3 of | artificial | AA | RAGIIGTIGYYYGMDV |
| | CDH19 14301 | | | |
| 1207 | CDR-L1 of | artificial | AA | SGDRLGEKYTC |
| | CDH19 14301 | | | |
| 1208 | CDR-L2 of | artificial | AA | QDTKRPS |
| | CDH19 14301 | | | |
| 1209 | CDR-L3 of | artificial | AA | QAWESSTVV |
| | CDH19 14301 | | | |
| 1210 | VH of CDH19 | artificial | NT | CAGGTGCAGTTGGTGGAGTCTGGGGGAGGCGTGGTCCAGCCTG |
| | 14301 | | | GGAGGTCCCTGAGACTCTCCTGTGCAGCGTCTGGATTCACCTT |
| | | | | CAGTAGCTATGGCATGCACTGGGTCCGCCAGGCTCCAGGCAAG |
| | | | | GGGCTGGAGTGGGTGGCATTTATATGGTATGATGGAAGTAATA |
| | | | | AATACTATGCAGACTCCGTGAAGGACCGATTCACCATCTCCAG |
| | | | | AGACAATTCCAAGAACACGCTGTATCTGCAAATGAAAAGCCTG |
| | | | | AGAGCTGAGGACACGGCTGTGTATTACTGTGCGAGAAGGGCCG |
| | | | | GTATAATAGGAACTATAGGCTACTACTACGGTATGGACGTCTG |
| | | | | GGGCCAAGGGACCACGGTCACCGTCTCTAGT |
| 1211 | VH of CDH19 | artificial | AA | QVQLVESGGGVVQPGRSLRLSCAASGFTFSSYGMHWVRQAPGK |
| | 14301 | | | GLEWVAFIWYDGSNKYYADSVKDRFTISRDNSKNTLYLQMKSL |
| | | | | RAEDTAVYYCARRAGIIGTIGYYYGMDVWGQGTTVTVSS |
| 1212 | VL of CDH19 | artificial | NT | TCCTATGAACTGACTCAGCCACCCTCAGTGTCCGTGTCCCCAG |
| | 14301 | | | GACAGACAGCCAGCATCACCTGCTCTGGAGATAGGTTGGGGGA |
| | | | | AAAATATACTTGCTGGTATCAGCAGAGGCCAGGCCAGTCCCCT |
| | | | | TTGCTGGTCATCTATCAAGATACCAAGCGGCCCTCAGGGATCC |
| | | | | CTGAGCGATTCTCTGGCTCCAACTCTGGTAACACAGCCACTCT |
| | | | | GACCATCAGCGGGACCCAGGCTATGGATGAGGCTGACTATTAC |
| | | | | TGTCAGGCGTGGGAGAGCAGCACTGTGGTATTCGGCGGAGGGA |
| | | | | CCAAGCTGACCGTCCTA |
| 1213 | VL of CDH19 | artificial | AA | SYELTQPPSVSVSPGQTASITCSGDRLGEKYTCWYQQRPGQSP |
| | 14301 | | | LLVIYQDTKRPSGIPERFSGSNSGNTATLTISGTQAMDEADYY |
| | | | | CQAWESSTVVFGGGTKLTVL |
| 1214 | VH-VL of | artificial | NT | CAGGTGCAGTTGGTGGAGTCTGGGGGAGGCGTGGTCCAGCCTG |
| | CDH19 14301 | | | GGAGGTCCCTGAGACTCTCCTGTGCAGCGTCTGGATTCACCTT |
| | | | | CAGTAGCTATGGCATGCACTGGGTCCGCCAGGCTCCAGGCAAG |
| | | | | GGGCTGGAGTGGGTGGCATTTATATGGTATGATGGAAGTAATA |
| | | | | AATACTATGCAGACTCCGTGAAGGACCGATTCACCATCTCCAG |
| | | | | AGACAATTCCAAGAACACGCTGTATCTGCAAATGAAAAGCCTG |
| | | | | AGAGCTGAGGACACGGCTGTGTATTACTGTGCGAGAAGGGCCG |
| | | | | GTATAATAGGAACTATAGGCTACTACTACGGTATGGACGTCTG |
| | | | | GGGCCAAGGGACCACGGTCACCGTCTCTAGTGGTGGCGGAGGA |
| | | | | TCTGGCGGAGGTGGAAGCGGAGGCGGCGGATCTTCCTATGAAC |
| | | | | TGACTCAGCCACCCTCAGTGTCCGTGTCCCCAGGACAGACAGC |
| | | | | CAGCATCACCTGCTCTGGAGATAGGTTGGGGGAAAAATATACT |
| | | | | TGCTGGTATCAGCAGAGGCCAGGCCAGTCCCCTTTGCTGGTCA |
| | | | | TCTATCAAGATACCAAGCGGCCCTCAGGGATCCCTGAGCGATT |
| | | | | CTCTGGCTCCAACTCTGGTAACACAGCCACTCTGACCATCAGC |
| | | | | GGGACCCAGGCTATGGATGAGGCTGACTATTACTGTCAGGCGT |
| | | | | GGGAGAGCAGCACTGTGGTATTCGGCGGAGGGACCAAGCTGAC |
| | | | | CGTCCTA |
| 1215 | VH-VL of | artificial | AA | QVQLVESGGGVVQPGRSLRLSCAASGFTFSSYGMHWVRQAPGK |
| | CDH19 14301 | | | GLEWVAFIWYDGSNKYYADSVKDRFTISRDNSKNTLYLQMKSL |
| | | | | RAEDTAVYYCARRAGIIGTIGYYYGMDVWGQGTTVTVSSGGGG |
| | | | | SGGGGSGGGGSSYELTQPPSVSVSPGQTASITCSGDRLGEKYT |
| | | | | CWYQQRPGQSPLLVIYQDTKRPSGIPERFSGSNSGNTATLTIS |
| | | | | GTQAMDEADYYCQAWESSTVVFGGGTKLTVL |
| 1216 | CDH19 14301 | artificial | | QVQLVESGGGVVQPGRSLRLSCAASGFTFSSYGMHWVRQAPGK |
| | x I2C | | | GLEWVAFIWYDGSNKYYADSVKDRFTISRDNSKNTLYLQMKSL |
| | | | | RAEDTAVYYCARRAGIIGTIGYYYGMDVWGQGTTVTVSSGGGG |
| | | | | SGGGGSGGGGSSYELTQPPSVSVSPGQTASITCSGDRLGEKYT |
| | | | | CWYQQRPGQSPLLVIYQDTKRPSGIPERFSGSNSGNTATLTIS |
| | | | | GTQAMDEADYYCQAWESSTVVFGGGTKLTVLSGGGGSEVQLVE |
| | | | | SGGGLVQPGGSLKLSCAASGFTFNKYAMNWVRQAPGKGLEWVA |
| | | | | RIRSKYNNYATYYADSVKDRFTISRDDSKNTAYLQMNNLKTED |
| | | | | TAVYYCVRHGNFGNSYISYWAYWGQGTLVTVSSGGGGSGGGGS |
| | | | | GGGGSQTVVTQEPSLTVSPGGTVTLTCGSSTGAVTSGNYPNWV |
| | | | | QQKPGQAPRGLIGGTKFLAPGTPARFSGSLLGGKAALTLSGVQ |
| | | | | PEDEAEYYCVLWYSNRWVFGGGTKLTVLHHHHHH |
| 1217 | CDR-H1 of | artificial | AA | RYGIH |
| | CDH19 14079 | | | |
| 1218 | CDR-H2 of | artificial | AA | VIWYEGSNKYYAESVKG |
| | CDH19 14079 | | | |
| 1219 | CDR-H3 of | artificial | AA | RAGIPGTTGYYYGMDV |
| | CDH19 14079 | | | |
| 1220 | CDR-L1 of | artificial | AA | SGDRLGEKYVS |
| | CDH19 14079 | | | |
| 1221 | CDR-L2 of | artificial | AA | QDNKWPS |
| | CDH19 14079 | | | |
| 1222 | CDR-L3 of | artificial | AA | QAWESSTVV |
| | CDH19 14079 | | | |
| 1223 | VH of CDH19 | artificial | NT | CAGGTGCAGCTGGTGGAGTCTGGGGGAGGCGTGGTCCAGCCTG |
| | 14079 | | | GGGGGTCCCTGAGACTCTCCTGTGCAGCGTCTGGATTCACCTT |
| | | | | CAGTCGCTATGGCATACACTGGGTCCGCCAGGCTCCAGGCAAG |
| | | | | GGGCTGGAGTGGGTGGCAGTTATATGGTATGAGGGAAGTAATA |
| | | | | AATACTATGCAGAGTCCGTGAAGGGCCGATTCACCATCTCCAG |
| | | | | AGACAATTCCAAGAACACGCTGTATCTGCAAATGAACAGCCTG |
| | | | | AGAGCCGAGGACTCGGCTGTGTATTACTGTGCGAGAAGGGCCG |
| | | | | GTATACCTGGAACTACGGGCTACTACTATGGTATGGACGTCTG |
| | | | | GGGCCAAGGGACCACGGTCACCGTCTCCTCA |
| 1224 | VH of CDH19 | artificial | AA | QVQLVESGGGVVQPGGSLRLSCAASGFTFSRYGIHWVRQAPGK |
| | 14079 | | | GLEWVAVIWYEGSNKYYAESVKGRFTISRDNSKNTLYLQMNSL |
| | | | | RAEDSAVYYCARRAGIPGTTGYYYGMDVWGQGTTVTVSS |
| 1225 | VL of CDH19 | artificial | NT | TCCTATGAGCTGACTCAGCCACCCTCAGTGTCCGTGTCCCCAG |
| | 14079 | | | GACAGACAGCCAGCATCACCTGCTCTGGAGATAGATTGGGGGA |
| | | | | GAAATATGTTAGCTGGTATCAGCAGAAGCCAGGCCAGTCCCCT |
| | | | | ATACTGGTCATCTATCAAGATAATAAGTGGCCCTCAGGGATCC |
| | | | | CTGAGCGATTCTCTGGCTCCAACTCTGGGAACACAGCCACTCT |
| | | | | GACCATCAGCGGGACCCAGGCTATGGATGAGGCTGACTATTAC |
| | | | | TGTCAGGCGTGGGAGAGCAGCACTGTGGTATTCGGCGGGGGGA |
| | | | | CCAAGCTGACCGTCCTA |
| 1226 | VL of CDH19 | artificial | AA | SYELTQPPSVSVSPGQTASITCSGDRLGEKYVSWYQQKPGQSP |
| | 14079 | | | ILVIYQDNKWPSGIPERFSGSNSGNTATLTISGTQAMDEADYY |
| | | | | CQAWESSTVVFGGGTKLTVL |
| 1227 | VH-VL of | artificial | NT | CAGGTGCAGCTGGTGGAGTCTGGGGGAGGCGTGGTCCAGCCTG |
| | CDH19 14079 | | | GGGGGTCCCTGAGACTCTCCTGTGCAGCGTCTGGATTCACCTT |
| | | | | CAGTCGCTATGGCATACACTGGGTCCGCCAGGCTCCAGGCAAG |
| | | | | GGGCTGGAGTGGGTGGCAGTTATATGGTATGAGGGAAGTAATA |
| | | | | AATACTATGCAGAGTCCGTGAAGGGCCGATTCACCATCTCCAG |
| | | | | AGACAATTCCAAGAACACGCTGTATCTGCAAATGAACAGCCTG |
| | | | | AGAGCCGAGGACTCGGCTGTGTATTACTGTGCGAGAAGGGCCG |
| | | | | GTATACCTGGAACTACGGGCTACTACTATGGTATGGACGTCTG |
| | | | | GGGCCAAGGGACCACGGTCACCGTCTCCTCAGGTGGCGGAGGA |
| | | | | TCTGGCGGAGGTGGAAGCGGAGGCGGCGGATCTTCCTATGAGC |
| | | | | TGACTCAGCCACCCTCAGTGTCCGTGTCCCCAGGACAGACAGC |
| | | | | CAGCATCACCTGCTCTGGAGATAGATTGGGGGAGAAATATGTT |
| | | | | AGCTGGTATCAGCAGAAGCCAGGCCAGTCCCCTATACTGGTCA |
| | | | | TCTATCAAGATAATAAGTGGCCCTCAGGGATCCCTGAGCGATT |
| | | | | CTCTGGCTCCAACTCTGGGAACACAGCCACTCTGACCATCAGC |
| | | | | GGGACCCAGGCTATGGATGAGGCTGACTATTACTGTCAGGCGT |
| | | | | GGGAGAGCAGCACTGTGGTATTCGGCGGGGGGACCAAGCTGAC |
| | | | | CGTCCTA |
| 1228 | VH-VL of | artificial | AA | QVQLVESGGGVVQPGGSLRLSCAASGFTFSRYGIHWVRQAPGK |
| | CDH19 14079 | | | GLEWVAVIWYEGSNKYYAESVKGRFTISRDNSKNTLYLQMNSL |
| | | | | RAEDSAVYYCARRAGIPGTTGYYYGMDVWGQGTTVTVSSGGGG |
| | | | | SGGGGSGGGGSSYELTQPPSVSVSPGQTASITCSGDRLGEKYV |
| | | | | SWYQQKPGQSPILVIYQDNKWPSGIPERFSGSNSGNTATLTIS |
| | | | | GTQAMDEADYYCQAWESSTVVFGGGTKLTVL |
| 1229 | CDH19 14079 | artificial | | QVQLVESGGGVVQPGGSLRLSCAASGFTFSRYGIHWVRQAPGK |
| | x I2C | | | GLEWVAVIWYEGSNKYYAESVKGRFTISRDNSKNTLYLQMNSL |
| | | | | RAEDSAVYYCARRAGIPGTTGYYYGMDVWGQGTTVTVSSGGGG |
| | | | | SGGGGSGGGGSSYELTQPPSVSVSPGQTASITCSGDRLGEKYV |
| | | | | SWYQQKPGQSPILVIYQDNKWPSGIPERFSGSNSGNTATLTIS |
| | | | | GTQAMDEADYYCQAWESSTVVFGGGTKLTVLSGGGGSEVQLVE |
| | | | | SGGGLVQPGGSLKLSCAASGFTFNKYAMNWVRQAPGKGLEWVA |
| | | | | RIRSKYNNYATYYADSVKDRFTISRDDSKNTAYLQMNNLKTED |
| | | | | TAVYYCVRHGNFGNSYISYWAYWGQGTLVTVSSGGGGSGGGGS |
| | | | | GGGGSQTVVTQEPSLTVSPGGTVTLTCGSSTGAVTSGNYPNWV |
| | | | | QQKPGQAPRGLIGGTKFLAPGTPARFSGSLLGGKAALTLSGVQ |
| | | | | PEDEAEYYCVLWYSNRWVFGGGTKLTVLHHHHHH |
| 1230 | CDR-H1 of | artificial | AA | RYGIH |
| | CDH19 14077 | | | |
| 1231 | CDR-H2 of | artificial | AA | VIWYDGSNKYYADSVKG |
| | CDH19 14077 | | | |
| 1232 | CDR-H3 of | artificial | AA | RAGIPGTTGYYYGMDV |
| | CDH19 14077 | | | |
| 1233 | CDR-L1 of | artificial | AA | SGDRLGEKYVS |
| | CDH19 14077 | | | |
| 1234 | CDR-L2 of | artificial | AA | QDNKWPS |
| | CDH19 14077 | | | |
| 1235 | CDR-L3 of | artificial | AA | QAWDSSTVV |
| | CDH19 14077 | | | |
| 1236 | VH of CDH19 | artificial | NT | CAGGTGCAGCTGGTGGAGTCTGGGGGAGGCGTGGTCCAGCCTG |
| | 14077 | | | GGAGGTCCCTGAGACTCTCCTGTGCAGCGTCTGGATTCACCTT |
| | | | | CAGTCGCTATGGCATACACTGGGTCCGCCAGGCTCCAGGCAAG |
| | | | | GGGCTGGAGTGGGTGGCAGTTATATGGTATGATGGAAGTAATA |
| | | | | AATACTATGCAGACTCCGTGAAGGGCCGATTCACCATCTCCAG |
| | | | | AGACAATTCCAAGAACACGCTGTATCTGCAAATGAACAGCCTG |
| | | | | AGAGCCGAGGACTCGGCTGTGTATTACTGTGCGAGAAGGGCCG |
| | | | | GTATACCTGGAACTACGGGCTACTACTATGGTATGGACGTCTG |
| | | | | GGGCCAAGGGACCACGGTCACCGTCTCCTCA |
| 1237 | VH of CDH19 | artificial | AA | QVQLVESGGGVVQPGRSLRLSCAASGFTFSRYGIHWVRQAPGK |
| | 14077 | | | GLEWVAVIWYDGSNKYYADSVKGRFTISRDNSKNTLYLQMNSL |
| | | | | RAEDSAVYYCARRAGIPGTTGYYYGMDVWGQGTTVTVSS |
| 1238 | VL of CDH19 | artificial | NT | TCCTATGAGCTGACTCAGCCACCCTCAGTGTCCGTGTCCCCAG |
| | 14077 | | | GACAGACAGCCAGCATCACCTGCTCTGGAGATAGATTGGGGGA |
| | | | | GAAATATGTTAGCTGGTATCAGCAGAAGCCAGGCCAGTCCCCT |
| | | | | ATACTGGTCATCTATCAAGATAATAAGTGGCCCTCAGGGATCC |
| | | | | CTGAGCGATTCTCTGGCTCCAACTCTGGGAACACAGCCACTCT |
| | | | | GACCATCAGCGGGACCCAGGCTATGGATGAGGCTGACTATTAC |
| | | | | TGTCAGGCGTGGGACAGCAGCACTGTGGTATTCGGCGGGGGGA |
| | | | | CCAAGCTGACCGTCCTA |
| 1239 | VL of CDH19 | artificial | AA | SYELTQPPSVSVSPGQTASITCSGDRLGEKYVSWYQQKPGQSP |
| | 14077 | | | ILVIYQDNKWPSGIPERFSGSNSGNTATLTISGTQAMDEADYY |
| | | | | CQAWDSSTVVFGGGTKLTVL |
| 1240 | VH-VL of | artificial | NT | CAGGTGCAGCTGGTGGAGTCTGGGGGAGGCGTGGTCCAGCCTG |
| | CDH19 14077 | | | GGAGGTCCCTGAGACTCTCCTGTGCAGCGTCTGGATTCACCTT |
| | | | | CAGTCGCTATGGCATACACTGGGTCCGCCAGGCTCCAGGCAAG |
| | | | | GGGCTGGAGTGGGTGGCAGTTATATGGTATGATGGAAGTAATA |
| | | | | AATACTATGCAGACTCCGTGAAGGGCCGATTCACCATCTCCAG |
| | | | | AGACAATTCCAAGAACACGCTGTATCTGCAAATGAACAGCCTG |
| | | | | AGAGCCGAGGACTCGGCTGTGTATTACTGTGCGAGAAGGGCCG |
| | | | | GTATACCTGGAACTACGGGCTACTACTATGGTATGGACGTCTG |
| | | | | GGGCCAAGGGACCACGGTCACCGTCTCCTCAGGTGGCGGAGGA |
| | | | | TCTGGCGGAGGTGGAAGCGGAGGCGGCGGATCTTCCTATGAGC |
| | | | | TGACTCAGCCACCCTCAGTGTCCGTGTCCCCAGGACAGACAGC |
| | | | | CAGCATCACCTGCTCTGGAGATAGATTGGGGGAGAAATATGTT |
| | | | | AGCTGGTATCAGCAGAAGCCAGGCCAGTCCCCTATACTGGTCA |
| | | | | TCTATCAAGATAATAAGTGGCCCTCAGGGATCCCTGAGCGATT |
| | | | | CTCTGGCTCCAACTCTGGGAACACAGCCACTCTGACCATCAGC |
| | | | | GGGACCCAGGCTATGGATGAGGCTGACTATTACTGTCAGGCGT |
| | | | | GGGACAGCAGCACTGTGGTATTCGGCGGGGGGACCAAGCTGAC |
| | | | | CGTCCTA |
| 1241 | VH-VL of | artificial | AA | QVQLVESGGGVVQPGRSLRLSCAASGFTFSRYGIHWVRQAPGK |
| | CDH19 14077 | | | GLEWVAVIWYDGSNKYYADSVKGRFTISRDNSKNTLYLQMNSL |
| | | | | RAEDSAVYYCARRAGIPGTTGYYYGMDVWGQGTTVTVSSGGGG |
| | | | | SGGGGSGGGGSSYELTQPPSVSVSPGQTASITCSGDRLGEKYV |
| | | | | SWYQQKPGQSPILVIYQDNKWPSGIPERFSGSNSGNTATLTIS |
| | | | | GTQAMDEADYYCQAWDSSTVVFGGGTKLTVL |
| 1242 | CDH19 14077 | artificial | | QVQLVESGGGVVQPGRSLRLSCAASGFTFSRYGIHWVRQAPGK |
| | x I2C | | | GLEWVAVIWYDGSNKYYADSVKGRFTISRDNSKNTLYLQMNSL |
| | | | | RAEDSAVYYCARRAGIPGTTGYYYGMDVWGQGTTVTVSSGGGG |
| | | | | SGGGGSGGGGSSYELTQPPSVSVSPGQTASITCSGDRLGEKYV |
| | | | | SWYQQKPGQSPILVIYQDNKWPSGIPERFSGSNSGNTATLTIS |
| | | | | GTQAMDEADYYCQAWDSSTVVFGGGTKLTVLSGGGGSEVQLVE |
| | | | | SGGGLVQPGGSLKLSCAASGFTFNKYAMNWVRQAPGKGLEWVA |
| | | | | RIRSKYNNYATYYADSVKDRFTISRDDSKNTAYLQMNNLKTED |
| | | | | TAVYYCVRHGNFGNSYISYWAYWGQGTLVTVSSGGGGSGGGGS |
| | | | | GGGGSQTVVTQEPSLTVSPGGTVTLTCGSSTGAVTSGNYPNWV |
| | | | | QQKPGQAPRGLIGGTKFLAPGTPARFSGSLLGGKAALTLSGVQ |
| | | | | PEDEAEYYCVLWYSNRWVFGGGTKLTVLHHHHHH |
| 1243 | CDR-H1 of | artificial | AA | SYYIH |
| | CDH19 14096 | | | |
| 1244 | CDR-H2 of | artificial | AA | IINPSGGSTRYAQKFQG |
| | CDH19 14096 | | | |
| 1245 | CDR-H3 of | artificial | AA | GGIQLWLHFDY |
| | CDH19 14096 | | | |
| 1246 | CDR-L1 of | artificial | AA | SGSSSNIGRNFVN |
| | CDH19 14096 | | | |
| 1247 | CDR-L2 of | artificial | AA | TNNQRPS |
| | CDH19 14096 | | | |
| 1248 | CDR-L3 of | artificial | AA | AAWDESLNGWV |
| | CDH19 14096 | | | |
| 1249 | VH of CDH19 | artificial | NT | CAGGTGCAGCTGGTGCAGTCTGGGGCTGAGGTGAAGAAGCCTG |
| | 14096 | | | GGGCCTCAGTGAAGGTTTCCTGCAAGGCATCTGGATACACCTT |
| | | | | CACCAGCTACTATATTCACTGGGTGCGCCAGGCCCCTGGACAA |
| | | | | GGACTTGAGTGGATGGGAATAATCAACCCCAGTGGTGGTAGCA |
| | | | | CAAGGTACGCACAGAAGTTCCAGGGCAGAGTCACCATGACCAG |
| | | | | GGACACGTCCACGAGCACAGTCTACATGGAGCTGAGCAGCCTG |
| | | | | AGATCTGAGGACACGGCCGTGTATTACTGTGCGCGAGGGGGAA |
| | | | | TACAGCTATGGTTACATTTTGACTACTGGGGCCAGGGAACCCT |
| | | | | GGTCACCGTCTCCTCA |
| 1250 | VH of CDH19 | artificial | AA | QVQLVQSGAEVKKPGASVKVSCKASGYTFTSYYIHWVRQAPGQ |
| | 14096 | | | GLEWMGIINPSGGSTRYAQKFQGRVTMTRDTSTSTVYMELSSL |
| | | | | RSEDTAVYYCARGGIQLWLHFDYWGQGTLVTVSS |
| 1251 | VL of CDH19 | artificial | NT | CAGTCTGCGCTGACTCAGCCACCCTCAGCGACTGGGACCCCCG |
| | 14096 | | | GGCAGAGGGTCACCATCTCTTGTTCTGGAAGCAGCTCCAACAT |
| | | | | CGGAAGGAATTTTGTAAACTGGTATCAGCAGCTCCCAGGAACG |
| | | | | GCCCCCAAAGTCCTCATTTATACTAATAATCAGCGGCCCTCAG |
| | | | | GGGTCCCTGACCGATTCTCTGGCTCCAAGTCTGGCACCTCAGC |
| | | | | CTCCCTGGCCATCAGTGGGCTCCAGTCTGAGGATGAGGCTGAT |
| | | | | TATTACTGTGCAGCATGGGATGAGAGCCTGAATGGTTGGGTGT |
| | | | | TCGGCGGAGGGACCAAGCTGACCGTCCTA |
| 1252 | VL of CDH19 | artificial | AA | QSALTQPPSATGTPGQRVTISCSGSSSNIGRNFVNWYQQLPGT |
| | | | | APKVLIYTNNQRPSGVPDRFSGSKSGTSASLAISGLQSEDEAD |
| | | | | YYCAAWDESLNGWVFGGGTKLTVL |
| 1253 | VH-VL of | artificial | NT | CAGGTGCAGCTGGTGCAGTCTGGGGCTGAGGTGAAGAAGCCTG |
| | CDH19 14096 | | | GGGCCTCAGTGAAGGTTTCCTGCAAGGCATCTGGATACACCTT |
| | | | | CACCAGCTACTATATTCACTGGGTGCGCCAGGCCCCTGGACAA |
| | | | | GGACTTGAGTGGATGGGAATAATCAACCCCAGTGGTGGTAGCA |
| | | | | CAAGGTACGCACAGAAGTTCCAGGGCAGAGTCACCATGACCAG |
| | | | | GGACACGTCCACGAGCACAGTCTACATGGAGCTGAGCAGCCTG |
| | | | | AGATCTGAGGACACGGCCGTGTATTACTGTGCGCGAGGGGGAA |
| | | | | TACAGCTATGGTTACATTTTGACTACTGGGGCCAGGGAACCCT |
| | | | | GGTCACCGTCTCCTCAGGTGGCGGAGGATCTGGCGGAGGTGGA |
| | | | | AGCGGAGGCGGCGGATCTCAGTCTGCGCTGACTCAGCCACCCT |
| | | | | CAGCGACTGGGACCCCCGGGCAGAGGGTCACCATCTCTTGTTC |
| | | | | TGGAAGCAGCTCCAACATCGGAAGGAATTTTGTAAACTGGTAT |
| | | | | CAGCAGCTCCCAGGAACGGCCCCCAAAGTCCTCATTTATACTA |
| | | | | ATAATCAGCGGCCCTCAGGGGTCCCTGACCGATTCTCTGGCTC |
| | | | | CAAGTCTGGCACCTCAGCCTCCCTGGCCATCAGTGGGCTCCAG |
| | | | | TCTGAGGATGAGGCTGATTATTACTGTGCAGCATGGGATGAGA |
| | | | | GCCTGAATGGTTGGGTGTTCGGCGGAGGGACCAAGCTGACCGT |
| | | | | CCTA |
| 1254 | VH-VL of | artificial | AA | QVQLVQSGAEVKKPGASVKVSCKASGYTFTSYYIHWVRQAPGQ |
| | CDH19 14096 | | | GLEWMGIINPSGGSTRYAQKFQGRVTMTRDTSTSTVYMELSSL |
| | | | | RSEDTAVYYCARGGIQLWLHFDYWGQGTLVTVSSGGGGSGGGG |
| | | | | SGGGGSQSALTQPPSATGTPGQRVTISCSGSSSNIGRNFVNWY |
| | | | | QQLPGTAPKVLIYTNNQRPSGVPDRFSGSKSGTSASLAISGLQ |
| | | | | SEDEADYYCAAWDESLNGWVFGGGTKLTVL |
| 1255 | CDH19 14096 | artificial | | QVQLVQSGAEVKKPGASVKVSCKASGYTFTSYYIHWVRQAPGQ |
| | x I2C | | | GLEWMGIINPSGGSTRYAQKFQGRVTMTRDTSTSTVYMELSSL |
| | | | | RSEDTAVYYCARGGIQLWLHFDYWGQGTLVTVSSGGGGSGGGG |
| | | | | SGGGGSQSALTQPPSATGTPGQRVTISCSGSSSNIGRNFVNWY |
| | | | | QQLPGTAPKVLIYTNNQRPSGVPDRFSGSKSGTSASLAISGLQ |
| | | | | SEDEADYYCAAWDESLNGWVFGGGTKLTVLSGGGGSEVQLVES |
| | | | | GGGLVQPGGSLKLSCAASGFTFNKYAMNWVRQAPGKGLEWVAR |
| | | | | IRSKYNNYATYYADSVKDRFTISRDDSKNTAYLQMNNLKTEDT |
| | | | | AVYYCVRHGNFGNSYISYWAYWGQGTLVTVSSGGGGSGGGGSG |
| | | | | GGGSQTVVTQEPSLTVSPGGTVTLTCGSSTGAVTSGNYPNWVQ |
| | | | | QKPGQAPRGLIGGTKFLAPGTPARFSGSLLGGKAALTLSGVQP |
| | | | | EDEAEYYCVLWYSNRWVFGGGTKLTVLHHHHHH |
| 1256 | CDR-H1 of | artificial | AA | SYYMS |
| | CDH19 14088 | | | |
| 1257 | CDR-H2 of | artificial | AA | IIHPSGGDTTYAQKFQG |
| | CDH19 14088 | | | |
| 1258 | CDR-H3 of | artificial | AA | GGIKLWLHFDY |
| | CDH19 14088 | | | |
| 1259 | CDR-L1 of | artificial | AA | SGSRSNIGSNFVN |
| | CDH19 14088 | | | |
| 1260 | CDR-L2 of | artificial | AA | TNNQRPS |
| | CDH19 14088 | | | |
| 1261 | CDR-L3 of | artificial | AA | AVWDDSLNGWV |
| | CDH19 14088 | | | |
| 1262 | VH of CDH19 | artificial | NT | CAGGTGCAGTTGGTGCAGTCTGGGGCTGAGGTGAAGAAGCCTG |
| | 14088 | | | GGGCCTCAGTGAAGGTTTCCTGTAAGGCATCTGGATACACCTT |
| | | | | CACCAGCTACTATATGTCCTGGGTGCGACAGGCCCCTGGACAA |
| | | | | GGGCTTGAGTGGATGGGAATAATCCACCCTAGTGGTGGTGACA |
| | | | | CAACCTACGCACAGAAGTTCCAGGGCAGAGTCACCATGACCAG |
| | | | | GGACACGTCCACGAGCACAGTCTACATGGAGCTGAGCAGCCTG |
| | | | | AGATCTGAGGACACGGCCGTGTATTACTGTGCGAGAGGGGGGA |
| | | | | TAAAACTATGGTTACATTTTGACTATTGGGGCCAGGGAACCCT |
| | | | | GGTCACCGTCTCCTCA |
| 1263 | VH of CDH19 | artificial | AA | QVQLVQSGAEVKKPGASVKVSCKASGYTFTSYYMSWVRQAPGQ |
| | 14088 | | | GLEWMGIIHPSGGDTTYAQKFQGRVTMTRDTSTSTVYMELSSL |
| | | | | RSEDTAVYYCARGGIKLWLHFDYWGQGTLVTVSS |
| 1264 | VL of CDH19 | artificial | NT | CAGTCTGTGCTGACTCAGCCACCCTCAGCGTCTGGGACCCCCG |
| | 14088 | | | GACAGAGGGTCACCATCTCTTGTTCTGGAAGCCGCTCCAACAT |
| | | | | CGGAAGTAATTTTGTAAACTGGTACCAGCAGCTCCCAGGAACG |
| | | | | GCCCCCAAACTCCTCATCTATACTAATAATCAGCGGCCCTCAG |
| | | | | GGGTCCCTGACCGATTCTCTGGCTCCAAGTCTGGCACCTCAGC |
| | | | | CTCCCTGGCCATCAGTGGGCTCCAGTCTGAGGATGAGGCTGAT |
| | | | | TATTACTGTGCAGTATGGGATGACAGCCTGAATGGTTGGGTGT |
| | | | | TCGGCGGAGGGACCAAGCTGACCGTCCTA |
| 1265 | VL of CDH19 | artificial | AA | QSVLTQPPSASGTPGQRVTISCSGSRSNIGSNFVNWYQQLPGT |
| | 14088 | | | APKLLIYTNNQRPSGVPDRFSGSKSGTSASLAISGLQSEDEAD |
| | | | | YYCAVWDDSLNGWVFGGGTKLTVL |
| 1266 | VH-VL of | artificial | NT | CAGGTGCAGTTGGTGCAGTCTGGGGCTGAGGTGAAGAAGCCTG |
| | CDH19 14088 | | | GGGCCTCAGTGAAGGTTTCCTGTAAGGCATCTGGATACACCTT |
| | | | | CACCAGCTACTATATGTCCTGGGTGCGACAGGCCCCTGGACAA |
| | | | | GGGCTTGAGTGGATGGGAATAATCCACCCTAGTGGTGGTGACA |
| | | | | CAACCTACGCACAGAAGTTCCAGGGCAGAGTCACCATGACCAG |
| | | | | GGACACGTCCACGAGCACAGTCTACATGGAGCTGAGCAGCCTG |
| | | | | AGATCTGAGGACACGGCCGTGTATTACTGTGCGAGAGGGGGGA |
| | | | | TAAAACTATGGTTACATTTTGACTATTGGGGCCAGGGAACCCT |
| | | | | GGTCACCGTCTCCTCAGGTGGCGGAGGATCTGGCGGAGGTGGA |
| | | | | AGCGGAGGCGGCGGATCTCAGTCTGTGCTGACTCAGCCACCCT |
| | | | | CAGCGTCTGGGACCCCCGGACAGAGGGTCACCATCTCTTGTTC |
| | | | | TGGAAGCCGCTCCAACATCGGAAGTAATTTTGTAAACTGGTAC |
| | | | | CAGCAGCTCCCAGGAACGGCCCCCAAACTCCTCATCTATACTA |
| | | | | ATAATCAGCGGCCCTCAGGGGTCCCTGACCGATTCTCTGGCTC |
| | | | | CAAGTCTGGCACCTCAGCCTCCCTGGCCATCAGTGGGCTCCAG |
| | | | | TCTGAGGATGAGGCTGATTATTACTGTGCAGTATGGGATGACA |
| | | | | GCCTGAATGGTTGGGTGTTCGGCGGAGGGACCAAGCTGACCGT |
| | | | | CCTA |
| 1267 | VH-VL of | artificial | AA | QVQLVQSGAEVKKPGASVKVSCKASGYTFTSYYMSWVRQAPGQ |
| | CDH19 14088 | | | GLEWMGIIHPSGGDTTYAQKFQGRVTMTRDTSTSTVYMELSSL |
| | | | | RSEDTAVYYCARGGIKLWLHFDYWGQGTLVTVSSGGGGSGGGG |
| | | | | SGGGGSQSVLTQPPSASGTPGQRVTISCSGSRSNIGSNFVNWY |
| | | | | QQLPGTAPKLLIYTNNQRPSGVPDRFSGSKSGTSASLAISGLQ |
| | | | | SEDEADYYCAVWDDSLNGWVFGGGTKLTVL |
| 1268 | CDH19 14088 | artificial | | QVQLVQSGAEVKKPGASVKVSCKASGYTFTSYYMSWVRQAPGQ |
| | x I2C | | | GLEWMGIIHPSGGDTTYAQKFQGRVTMTRDTSTSTVYMELSSL |
| | | | | RSEDTAVYYCARGGIKLWLHFDYWGQGTLVTVSSGGGGSGGGG |
| | | | | SGGGGSQSVLTQPPSASGTPGQRVTISCSGSRSNIGSNFVNWY |
| | | | | QQLPGTAPKLLIYTNNQRPSGVPDRFSGSKSGTSASLAISGLQ |
| | | | | SEDEADYYCAVWDDSLNGWVFGGGTKLTVLSGGGGSEVQLVES |
| | | | | GGGLVQPGGSLKLSCAASGFTFNKYAMNWVRQAPGKGLEWVAR |
| | | | | IRSKYNNYATYYADSVKDRFTISRDDSKNTAYLQMNNLKTEDT |
| | | | | AVYYCVRHGNFGNSYISYWAYWGQGTLVTVSSGGGGSGGGGSG |
| | | | | GGGSQTVVTQEPSLTVSPGGTVTLTCGSSTGAVTSGNYPNWVQ |
| | | | | QKPGQAPRGLIGGTKFLAPGTPARFSGSLLGGKAALTLSGVQP |
| | | | | EDEAEYYCVLWYSNRWVFGGGTKLTVLHHHHHH |
| 1269 | CDR-H1 of | artificial | AA | SYYMS |
| | CDH19 14085 | | | |
| 1270 | CDR-H2 of | artificial | AA | IIHPSGGDTTYAQKFQG |
| | CDH19 14085 | | | |
| 1271 | CDR-H3 of | artificial | AA | GGIKLWLHFDY |
| | CDH19 14085 | | | |
| 1272 | CDR-L1 of | artificial | AA | SGSRSNIGSNFVN |
| | CDH19 14085 | | | |
| 1273 | CDR-L2 of | artificial | AA | TNNQRPS |
| | CDH19 14085 | | | |
| 1274 | CDR-L3 of | artificial | AA | AVYDDSLNGWV |
| | CDH19 14085 | | | |
| 1275 | VH of CDH19 | artificial | NT | CAGGTGCAGTTGGTGCAGTCTGGGGCTGAGGTGAAGAAGCCTG |
| | 14085 | | | GGGCCTCAGTGAAGGTTTCCTGTAAGGCATCTAGATACACCTT |
| | | | | CACCAGCTACTATATGTCCTGGGTGCGACAGGCCCCTGGACAA |
| | | | | GGGCTTGAGTGGATGGGAATAATCCACCCTAGTGGTGGTGACA |
| | | | | CAACCTACGCACAGAAGTTCCAGGGCAGAGTCACCATGACCGG |
| | | | | GGACACGTCCACGAGCACAGTCTACATGGAGCTGAGCAGCCTG |
| | | | | AGATCTGAGGACACGGCCGTGTATTACTGTGCGAGAGGGGGGA |
| | | | | TAAAACTATGGTTACATTTTGACTATTGGGGCCAGGGAACCCT |
| | | | | GGTCACCGTCTCCTCA |
| 1276 | VH of CDH19 | artificial | AA | QVQLVQSGAEVKKPGASVKVSCKASRYTFTSYYMSWVRQAPGQ |
| | 14085 | | | GLEWMGIIHPSGGDTTYAQKFQGRVTMTGDTSTSTVYMELSSL |
| | | | | RSEDTAVYYCARGGIKLWLHFDYWGQGTLVTVSS |
| 1277 | VL of CDH19 | artificial | NT | CAGTCTGTGCTGACTCAGCCACCCTCAGCGTCTGGGACCCCCG |
| | 14085 | | | GACAGAGGGTCACCATCTCTTGTTCTGGAAGCCGCTCCAACAT |
| | | | | CGGAAGTAATTTTGTAAACTGGTACCAGCAGCTCCCAGGAACG |
| | | | | GCCCCCAAACTCCTCATCTATACTAATAATCAGCGGCCCTCAG |
| | | | | GGGTCCCTGACCGATTCTCTGGCTCCAAGTCTGGCACCTCAGC |
| | | | | CTCCCTGGCCATCAGTGGGCTCCAGTCTGAGGATGAGGCTGAT |
| | | | | TATTACTGTGCAGTATACGATGACAGCCTGAATGGTTGGGTGT |
| | | | | TCGGCGGAGGGACCAAGCTGACCGTCCTA |
| 1278 | VL of CDH19 | artificial | AA | QSVLTQPPSASGTPGQRVTISCSGSRSNIGSNFVNWYQQLPGT |
| | 14085 | | | APKLLIYTNNQRPSGVPDRFSGSKSGTSASLAISGLQSEDEAD |
| | | | | YYCAVYDDSLNGWVFGGGTKLTVL |
| 1279 | VH-VL of | artificial | NT | CAGGTGCAGTTGGTGCAGTCTGGGGCTGAGGTGAAGAAGCCTG |
| | CDH19 14085 | | | GGGCCTCAGTGAAGGTTTCCTGTAAGGCATCTAGATACACCTT |
| | | | | CACCAGCTACTATATGTCCTGGGTGCGACAGGCCCCTGGACAA |
| | | | | GGGCTTGAGTGGATGGGAATAATCCACCCTAGTGGTGGTGACA |
| | | | | CAACCTACGCACAGAAGTTCCAGGGCAGAGTCACCATGACCGG |
| | | | | GGACACGTCCACGAGCACAGTCTACATGGAGCTGAGCAGCCTG |
| | | | | AGATCTGAGGACACGGCCGTGTATTACTGTGCGAGAGGGGGGA |
| | | | | TAAAACTATGGTTACATTTTGACTATTGGGGCCAGGGAACCCT |
| | | | | GGTCACCGTCTCCTCAGGTGGCGGAGGATCTGGCGGAGGTGGA |
| | | | | AGCGGAGGCGGCGGATCTCAGTCTGTGCTGACTCAGCCACCCT |
| | | | | CAGCGTCTGGGACCCCCGGACAGAGGGTCACCATCTCTTGTTC |
| | | | | TGGAAGCCGCTCCAACATCGGAAGTAATTTTGTAAACTGGTAC |
| | | | | CAGCAGCTCCCAGGAACGGCCCCCAAACTCCTCATCTATACTA |
| | | | | ATAATCAGCGGCCCTCAGGGGTCCCTGACCGATTCTCTGGCTC |
| | | | | CAAGTCTGGCACCTCAGCCTCCCTGGCCATCAGTGGGCTCCAG |
| | | | | TCTGAGGATGAGGCTGATTATTACTGTGCAGTATACGATGACA |
| | | | | GCCTGAATGGTTGGGTGTTCGGCGGAGGGACCAAGCTGACCGT |
| | | | | CCTA |
| 1280 | VH-VL of | artificial | AA | QVQLVQSGAEVKKPGASVKVSCKASRYTFTSYYMSWVRQAPGQ |
| | CDH19 14085 | | | GLEWMGIIHPSGGDTTYAQKFQGRVTMTGDTSTSTVYMELSSL |
| | | | | RSEDTAVYYCARGGIKLWLHFDYWGQGTLVTVSSGGGGSGGGG |
| | | | | SGGGGSQSVLTQPPSASGTPGQRVTISCSGSRSNIGSNFVNWY |
| | | | | QQLPGTAPKLLIYTNNQRPSGVPDRFSGSKSGTSASLAISGLQ |
| | | | | SEDEADYYCAVYDDSLNGWVFGGGTKLTVL |
| 1281 | CDH19 14085 | artificial | | QVQLVQSGAEVKKPGASVKVSCKASRYTFTSYYMSWVRQAPGQ |
| | x I2C | | | GLEWMGIIHPSGGDTTYAQKFQGRVTMTGDTSTSTVYMELSSL |
| | | | | RSEDTAVYYCARGGIKLWLHFDYWGQGTLVTVSSGGGGSGGGG |
| | | | | SGGGGSQSVLTQPPSASGTPGQRVTISCSGSRSNIGSNFVNWY |
| | | | | QQLPGTAPKLLIYTNNQRPSGVPDRFSGSKSGTSASLAISGLQ |
| | | | | SEDEADYYCAVYDDSLNGWVFGGGTKLTVLSGGGGSEVQLVES |
| | | | | GGGLVQPGGSLKLSCAASGFTFNKYAMNWVRQAPGKGLEWVAR |
| | | | | IRSKYNNYATYYADSVKDRFTISRDDSKNTAYLQMNNLKTEDT |
| | | | | AVYYCVRHGNFGNSYISYWAYWGQGTLVTVSSGGGGSGGGGSG |
| | | | | GGGSQTVVTQEPSLTVSPGGTVTLTCGSSTGAVTSGNYPNWVQ |
| | | | | QKPGQAPRGLIGGTKFLAPGTPARFSGSLLGGKAALTLSGVQP |
| | | | | EDEAEYYCVLWYSNRWVFGGGTKLTVLHHHHHH |
| 1282 | CDR-H1 of | artificial | AA | SYFIH |
| | CDH19 14074 | | | |
| 1283 | CDR-H2 of | artificial | AA | IINPISVSTSYAQKFQG |
| | CDH19 14074 | | | |
| 1284 | CDR-H3 of | artificial | AA | GGIQLWLHLDY |
| | CDH19 14074 | | | |
| 1285 | CDR-L1 of | artificial | AA | SGSRSNIGSNFVN |
| | CDH19 14074 | | | |
| 1286 | CDR-L2 of | artificial | AA | TNNQRPS |
| | CDH19 14074 | | | |
| 1287 | CDR-L3 of | artificial | AA | ATWDDSMNGWV |
| | CDH19 14074 | | | |
| 1288 | VH of CDH19 | artificial | NT | CAGGTGCAGTTGGTGCAGTCTGGGGCTGAGGTGAAGAAGCCTG |
| | 14074 | | | GGGCCTCAGTGAAGGTTTCCTGCAAGGTTTCTGGATACACCTT |
| | | | | CACCAGCTACTTTATTCACTGGGTGCGCCAGGCCCCTGGACAA |
| | | | | GGGCTTGAATGGATGGGAATTATCAACCCTATTAGTGTTAGCA |
| | | | | CAAGCTACGCACAGAAGTTCCAGGGCAGAGTCACCATGACCAG |
| | | | | GGACACGTCCACGAGCACAGTCTTCATGGAGCTGAGCAGCCTG |
| | | | | AGATCTGAGGACACGGCCGTGTATTACTGTGCGCGAGGGGGGA |
| | | | | TACAGCTATGGTTACATTTGGACTACTGGGGCCAGGGAACCCT |
| | | | | GGTCACCGTCTCCTCA |
| 1289 | VH of CDH19 | artificial | AA | QVQLVQSGAEVKKPGASVKVSCKVSGYTFTSYFIHWVRQAPGQ |
| | 14074 | | | GLEWMGIINPISVSTSYAQKFQGRVTMTRDTSTSTVFMELSSL |
| | | | | RSEDTAVYYCARGGIQLWLHLDYWGQGTLVTVSS |
| 1290 | VL of CDH19 | artificial | NT | CAGTCTGCGCTGACTCAGCCACCCTCAGTGACTGGGACCCCCG |
| | 14074 | | | GGCAGAGGGTCACCATCTCTTGTTCTGGAAGCAGGTCCAACAT |
| | | | | CGGAAGCAATTTTGTAAACTGGTACCAGCAGCTCCCAGGAACG |
| | | | | GCCCCCAAAGTCCTCATCTATACTAATAATCAGCGGCCCTCAG |
| | | | | GGGTCCCTGACCGATTCTCTGGCTCCAAGTCTGGCACCTCAGC |
| | | | | CTCCCTGGCCATCAGTGGGCTCCAGTCTGAGGATGAGGCTGAT |
| | | | | TATTACTGCGCAACATGGGATGACAGTATGAATGGTTGGGTGT |
| | | | | TCGGCGGAGGGACCAAACTGACCGTCCTA |
| 1291 | VL of CDH19 | artificial | AA | QSALTQPPSVTGTPGQRVTISCSGSRSNIGSNFVNWYQQLPGT |
| | 14074 | | | APKVLIYTNNQRPSGVPDRFSGSKSGTSASLAISGLQSEDEAD |
| | | | | YYCATWDDSMNGWVFGGGTKLTVL |
| 1292 | VH-VL of | artificial | NT | CAGGTGCAGTTGGTGCAGTCTGGGGCTGAGGTGAAGAAGCCTG |
| | CDH19 14074 | | | GGGCCTCAGTGAAGGTTTCCTGCAAGGTTTCTGGATACACCTT |
| | | | | CACCAGCTACTTTATTCACTGGGTGCGCCAGGCCCCTGGACAA |
| | | | | GGGCTTGAATGGATGGGAATTATCAACCCTATTAGTGTTAGCA |
| | | | | CAAGCTACGCACAGAAGTTCCAGGGCAGAGTCACCATGACCAG |
| | | | | GGACACGTCCACGAGCACAGTCTTCATGGAGCTGAGCAGCCTG |
| | | | | AGATCTGAGGACACGGCCGTGTATTACTGTGCGCGAGGGGGGA |
| | | | | TACAGCTATGGTTACATTTGGACTACTGGGGCCAGGGAACCCT |
| | | | | GGTCACCGTCTCCTCAGGTGGCGGAGGATCTGGCGGAGGTGGA |
| | | | | AGCGGAGGCGGCGGATCTCAGTCTGCGCTGACTCAGCCACCCT |
| | | | | CAGTGACTGGGACCCCCGGGCAGAGGGTCACCATCTCTTGTTC |
| | | | | TGGAAGCAGGTCCAACATCGGAAGCAATTTTGTAAACTGGTAC |
| | | | | CAGCAGCTCCCAGGAACGGCCCCCAAAGTCCTCATCTATACTA |
| | | | | ATAATCAGCGGCCCTCAGGGGTCCCTGACCGATTCTCTGGCTC |
| | | | | CAAGTCTGGCACCTCAGCCTCCCTGGCCATCAGTGGGCTCCAG |
| | | | | TCTGAGGATGAGGCTGATTATTACTGCGCAACATGGGATGACA |
| | | | | GTATGAATGGTTGGGTGTTCGGCGGAGGGACCAAACTGACCGT |
| | | | | CCTA |
| 1293 | VH-VL of | artificial | AA | QVQLVQSGAEVKKPGASVKVSCKVSGYTFTSYFIHWVRQAPGQ |
| | CDH19 14074 | | | GLEWMGIINPISVSTSYAQKFQGRVTMTRDTSTSTVFMELSSL |
| | | | | RSEDTAVYYCARGGIQLWLHLDYWGQGTLVTVSSGGGGSGGGG |
| | | | | SGGGGSQSALTQPPSVTGTPGQRVTISCSGSRSNIGSNFVNWY |
| | | | | QQLPGTAPKVLIYTNNQRPSGVPDRFSGSKSGTSASLAISGLQ |
| | | | | SEDEADYYCATWDDSMNGWVFGGGTKLTVL |
| 1294 | CDH19 14074 | artificial | | QVQLVQSGAEVKKPGASVKVSCKVSGYTFTSYFIHWVRQAPGQ |
| | x I2C | | | GLEWMGIINPISVSTSYAQKFQGRVTMTRDTSTSTVFMELSSL |
| | | | | RSEDTAVYYCARGGIQLWLHLDYWGQGTLVTVSSGGGGSGGGG |
| | | | | SGGGGSQSALTQPPSVTGTPGQRVTISCSGSRSNIGSNFVNWY |
| | | | | QQLPGTAPKVLIYTNNQRPSGVPDRFSGSKSGTSASLAISGLQ |
| | | | | SEDEADYYCATWDDSMNGWVFGGGTKLTVLSGGGGSEVQLVES |
| | | | | GGGLVQPGGSLKLSCAASGFTFNKYAMNWVRQAPGKGLEWVAR |
| | | | | IRSKYNNYATYYADSVKDRFTISRDDSKNTAYLQMNNLKTEDT |
| | | | | AVYYCVRHGNFGNSYISYWAYWGQGTLVTVSSGGGGSGGGGSG |
| | | | | GGGSQTVVTQEPSLTVSPGGTVTLTCGSSTGAVTSGNYPNWVQ |
| | | | | QKPGQAPRGLIGGTKFLAPGTPARFSGSLLGGKAALTLSGVQP |
| | | | | EDEAEYYCVLWYSNRWVFGGGTKLTVLHHHHHH |
| 1295 | CDR-H1 of | artificial | AA | SYFIH |
| | CDH19 14075 | | | |
| 1296 | CDR-H2 of | artificial | AA | IINPISVSTSYAQKFQG |
| | CDH19 14075 | | | |
| 1297 | CDR-H3 of | artificial | AA | GGIQLWLHLDY |
| | CDH19 14075 | | | |
| 1298 | CDR-L1 of | artificial | AA | SGSRSNIGSNFVN |
| | CDH19 14075 | | | |
| 1299 | CDR-L2 of | artificial | AA | TNNQRPS |
| | CDH19 14075 | | | |
| 1300 | CDR-L3 of | artificial | AA | ATWDESMQGWV |
| | CDH19 14075 | | | |
| 1301 | VH of CDH19 | artificial | NT | CAGGTGCAGTTGGTGCAGTCTGGGGCTGAGGTGAAGAAGCCTG |
| | 14075 | | | GGGCCTCAGTGAAGGTTTCCTGCAAGGTTTCTGGATACACCTT |
| | | | | CACCAGCTACTTTATTCACTGGGTGCGCCAGGCCCCTGGACAA |
| | | | | GGGCTTGAATGGATGGGAATTATCAACCCTATTAGTGTTAGCA |
| | | | | CAAGCTACGCACAGAAGTTCCAGGGCAGAGTCACCATGACCAG |
| | | | | GGACACGTCCACGAGCACAGTCTTCATGGAGCTGAGCAGCCTG |
| | | | | AGATCTGAGGACACGGCCGTGTATTACTGTGCGCGAGGGGGGA |
| | | | | TACAGCTATGGTTACATTTGGACTACTGGGGCCAGGGAACCCT |
| | | | | GGTCACCGTCTCCTCA |
| 1302 | VH of CDH19 | artificial | AA | QVQLVQSGAEVKKPGASVKVSCKVSGYTFTSYFIHWVRQAPGQ |
| | 14075 | | | GLEWMGIINPISVSTSYAQKFQGRVTMTRDTSTSTVFMELSSL |
| | | | | RSEDTAVYYCARGGIQLWLHLDYWGQGTLVTVSS |
| 1303 | VL of CDH19 | artificial | NT | CAGTCTGCGCTGACTCAGCCACCCTCAGTGACTGGGACCCCCG |
| | 14075 | | | GGCAGAGGGTCACCATCTCTTGTTCTGGAAGCAGGTCCAACAT |
| | | | | CGGAAGCAATTTTGTAAACTGGTACCAGCAGCTCCCAGGAACG |
| | | | | GCCCCCAAAGTCCTCATCTATACTAATAATCAGCGGCCCTCAG |
| | | | | GGGTCCCTGACCGATTCTCTGGCTCCAAGTCTGGCACCTCAGC |
| | | | | CTCCCTGGCCATCAGTGGGCTCCAGTCTGAGGATGAGGCTGAT |
| | | | | TATTACTGCGCAACATGGGATGAGAGTATGCAGGGTTGGGTGT |
| | | | | TCGGCGGAGGGACCAAACTGACCGTCCTA |
| 1304 | VL of CDH19 | artificial | AA | QSALTQPPSVTGTPGQRVTISCSGSRSNIGSNFVNWYQQLPGT |
| | 14075 | | | APKVLIYTNNQRPSGVPDRFSGSKSGTSASLAISGLQSEDEAD |
| | | | | YYCATWDESMQGWVFGGGTKLTVL |
| 1305 | VH-VL of | artificial | NT | CAGGTGCAGTTGGTGCAGTCTGGGGCTGAGGTGAAGAAGCCTG |
| | CDH19 14075 | | | GGGCCTCAGTGAAGGTTTCCTGCAAGGTTTCTGGATACACCTT |
| | | | | CACCAGCTACTTTATTCACTGGGTGCGCCAGGCCCCTGGACAA |
| | | | | GGGCTTGAATGGATGGGAATTATCAACCCTATTAGTGTTAGCA |
| | | | | CAAGCTACGCACAGAAGTTCCAGGGCAGAGTCACCATGACCAG |
| | | | | GGACACGTCCACGAGCACAGTCTTCATGGAGCTGAGCAGCCTG |
| | | | | AGATCTGAGGACACGGCCGTGTATTACTGTGCGCGAGGGGGGA |
| | | | | TACAGCTATGGTTACATTTGGACTACTGGGGCCAGGGAACCCT |
| | | | | GGTCACCGTCTCCTCAGGTGGCGGAGGATCTGGCGGAGGTGGA |
| | | | | AGCGGAGGCGGCGGATCTCAGTCTGCGCTGACTCAGCCACCCT |
| | | | | CAGTGACTGGGACCCCCGGGCAGAGGGTCACCATCTCTTGTTC |
| | | | | TGGAAGCAGGTCCAACATCGGAAGCAATTTTGTAAACTGGTAC |
| | | | | CAGCAGCTCCCAGGAACGGCCCCCAAAGTCCTCATCTATACTA |
| | | | | ATAATCAGCGGCCCTCAGGGGTCCCTGACCGATTCTCTGGCTC |
| | | | | CAAGTCTGGCACCTCAGCCTCCCTGGCCATCAGTGGGCTCCAG |
| | | | | TCTGAGGATGAGGCTGATTATTACTGCGCAACATGGGATGAGA |
| | | | | GTATGCAGGGTTGGGTGTTCGGCGGAGGGACCAAACTGACCGT |
| | | | | CCTA |
| 1306 | VH-VL of | artificial | AA | QVQLVQSGAEVKKPGASVKVSCKVSGYTFTSYFIHWVRQAPGQ |
| | CDH19 14075 | | | GLEWMGIINPISVSTSYAQKFQGRVTMTRDTSTSTVFMELSSL |
| | | | | RSEDTAVYYCARGGIQLWLHLDYWGQGTLVTVSSGGGGSGGGG |
| | | | | SGGGGSQSALTQPPSVTGTPGQRVTISCSGSRSNIGSNFVNWY |
| | | | | QQLPGTAPKVLIYTNNQRPSGVPDRFSGSKSGTSASLAISGLQ |
| | | | | SEDEADYYCATWDESMQGWVFGGGTKLTVL |
| 1307 | CDH19 14075 | artificial | | QVQLVQSGAEVKKPGASVKVSCKVSGYTFTSYFIHWVRQAPGQ |
| | x I2C | | | GLEWMGIINPISVSTSYAQKFQGRVTMTRDTSTSTVFMELSSL |
| | | | | RSEDTAVYYCARGGIQLWLHLDYWGQGTLVTVSSGGGGSGGGG |
| | | | | SGGGGSQSALTQPPSVTGTPGQRVTISCSGSRSNIGSNFVNWY |
| | | | | QQLPGTAPKVLIYTNNQRPSGVPDRFSGSKSGTSASLAISGLQ |
| | | | | SEDEADYYCATWDESMQGWVFGGGTKLTVLSGGGGSEVQLVES |
| | | | | GGGLVQPGGSLKLSCAASGFTFNKYAMNWVRQAPGKGLEWVAR |
| | | | | IRSKYNNYATYYADSVKDRFTISRDDSKNTAYLQMNNLKTEDT |
| | | | | AVYYCVRHGNFGNSYISYWAYWGQGTLVTVSSGGGGSGGGGSG |
| | | | | GGGSQTVVTQEPSLTVSPGGTVTLTCGSSTGAVTSGNYPNWVQ |
| | | | | QKPGQAPRGLIGGTKFLAPGTPARFSGSLLGGKAALTLSGVQP |
| | | | | EDEAEYYCVLWYSNRWVFGGGTKLTVLHHHHHH |
| 1308 | CDR-H1 of | artificial | AA | SSGYY |
| | CDH19 14024 | | | |
| 1309 | CDR-H2 of | artificial | AA | YIYYTGSAYYNPSLKS |
| | CDH19 14024 | | | |
| 1310 | CDR-H3 of | artificial | AA | DGSSGWYFQY |
| | CDH19 14024 | | | |
| 1311 | CDR-L1 of | artificial | AA | RASRQISSSYLA |
| | CDH19 14024 | | | |
| 1312 | CDR-L2 of | artificial | AA | GPSSRAT |
| | CDH19 14024 | | | |
| 1313 | CDR-L3 of | artificial | AA | QQYGSSFT |
| | CDH19 14024 | | | |
| 1314 | VH of CDH19 | artificial | NT | CAGGTGCAGCTGCAGGAGTCGGGCCCAGGACTGGTGAAGCCTT |
| | 14024 | | | CAGAGACCCTGTCCCTCACCTGCACTGTCTCTGGTGGCTCCAT |
| | | | | CAGCAGTAGTGGTTACTACTGGAGCTGGATCCGCCAGCCCCCA |
| | | | | GGGAAGGGCCTGGAGTGGATTGGGTACATCTATTACACTGGGA |
| | | | | GCGCCTACTACAACCCGTCCCTCAAGAGTCGAGTTACCATATC |
| | | | | AGTAGACACGTCTAAGAACCAGTTCTCCCTGAAGCTGAGCTCT |
| | | | | GTGACTGCCGCGGACACGGCCGTGTATTACTGTGCGAGAGATG |
| | | | | GAAGCAGTGGCTGGTACTTCCAGTATTGGGGCCAGGGCACCCT |
| | | | | GGTCACCGTCTCTAGT |
| 1315 | VH of CDH19 | artificial | AA | QVQLQESGPGLVKPSETLSLTCTVSGGSISSSGYYWSWIRQPP |
| | 14024 | | | GKGLEWIGYIYYTGSAYYNPSLKSRVTISVDTSKNQFSLKLSS |
| | | | | VTAADTAVYYCARDGSSGWYFQYWGQGTLVTVSS |
| 1316 | VL of CDH19 | artificial | NT | GAAATTGTGTTGACGCAGTCTCCAGGCACCCTGTCTTTGTCTC |
| | 14024 | | | CAGGGGAAAGAGCCACCCTCTCCTGCAGGGCCAGTCGGCAGAT |
| | | | | TAGCAGCAGCTACTTAGCCTGGTACCAGCAGAAACCTGGCCAG |
| | | | | GCTCCCAGGCTCCTCATCTATGGTCCATCCAGCAGGGCCACTG |
| | | | | GCATCCCAGACAGGTTCAGTGGCAGTGGGTCTGGGACAGACTT |
| | | | | CACTCTCACCATCAGCAGACTGGAGCCTGAAGATTTTGCAGTG |
| | | | | TATTACTGTCAGCAGTATGGTAGCTCATTCACTTTCGGCCAGG |
| | | | | GGACCAAAGTGGATATCAAA |
| 1317 | VL of CDH19 | artificial | AA | EIVLTQSPGTLSLSPGERATLSCRASRQISSSYLAWYQQKPGQ |
| | 14024 | | | APRLLIYGPSSRATGIPDRFSGSGSGTDFTLTISRLEPEDFAV |
| | | | | YYCQQYGSSFTFGQGTKVDIK |
| 1318 | VH-VL of | artificial | NT | CAGGTGCAGCTGCAGGAGTCGGGCCCAGGACTGGTGAAGCCTT |
| | CDH19 | | | CAGAGACCCTGTCCCTCACCTGCACTGTCTCTGGTGGCTCCAT |
| | | | | CAGCAGTAGTGGTTACTACTGGAGCTGGATCCGCCAGCCCCCA |
| | | | | GGGAAGGGCCTGGAGTGGATTGGGTACATCTATTACACTGGGA |
| | | | | GCGCCTACTACAACCCGTCCCTCAAGAGTCGAGTTACCATATC |
| | | | | AGTAGACACGTCTAAGAACCAGTTCTCCCTGAAGCTGAGCTCT |
| | | | | GTGACTGCCGCGGACACGGCCGTGTATTACTGTGCGAGAGATG |
| | | | | GAAGCAGTGGCTGGTACTTCCAGTATTGGGGCCAGGGCACCCT |
| | | | | GGTCACCGTCTCTAGTGGTGGCGGAGGATCTGGCGGAGGTGGA |
| | | | | AGCGGAGGCGGCGGATCTGAAATTGTGTTGACGCAGTCTCCAG |
| | | | | GCACCCTGTCTTTGTCTCCAGGGGAAAGAGCCACCCTCTCCTG |
| | | | | CAGGGCCAGTCGGCAGATTAGCAGCAGCTACTTAGCCTGGTAC |
| | | | | CAGCAGAAACCTGGCCAGGCTCCCAGGCTCCTCATCTATGGTC |
| | | | | CATCCAGCAGGGCCACTGGCATCCCAGACAGGTTCAGTGGCAG |
| | | | | TGGGTCTGGGACAGACTTCACTCTCACCATCAGCAGACTGGAG |
| | | | | CCTGAAGATTTTGCAGTGTATTACTGTCAGCAGTATGGTAGCT |
| | | | | CATTCACTTTCGGCCAGGGGACCAAAGTGGATATCAAA |
| 1319 | VH-VL of | artificial | AA | QVQLQESGPGLVKPSETLSLTCTVSGGSISSSGYYWSWIRQPP |
| | CDH19 14024 | | | GKGLEWIGYIYYTGSAYYNPSLKSRVTISVDTSKNQFSLKLSS |
| | | | | VTAADTAVYYCARDGSSGWYFQYWGQGTLVTVSSGGGGSGGGG |
| | | | | SGGGGSEIVLTQSPGTLSLSPGERATLSCRASRQISSSYLAWY |
| | | | | QQKPGQAPRLLIYGPSSRATGIPDRFSGSGSGTDFTLTISRLE |
| | | | | PEDFAVYYCQQYGSSFTFGQGTKVDIK |
| 1320 | CDH19 14024 | artificial | | QVQLQESGPGLVKPSETLSLTCTVSGGSISSSGYYWSWIRQPP |
| | x I2C | | | GKGLEWIGYIYYTGSAYYNPSLKSRVTISVDTSKNQFSLKLSS |
| | | | | VTAADTAVYYCARDGSSGWYFQYWGQGTLVTVSSGGGGSGGGG |
| | | | | SGGGGSEIVLTQSPGTLSLSPGERATLSCRASRQISSSYLAWY |
| | | | | QQKPGQAPRLLIYGPSSRATGIPDRFSGSGSGTDFTLTISRLE |
| | | | | PEDFAVYYCQQYGSSFTFGQGTKVDIKSGGGGSEVQLVESGGG |
| | | | | LVQPGGSLKLSCAASGFTFNKYAMNWVRQAPGKGLEWVARIRS |
| | | | | KYNNYATYYADSVKDRFTISRDDSKNTAYLQMNNLKTEDTAVY |
| | | | | YCVRHGNFGNSYISYWAYWGQGTLVTVSSGGGGSGGGGSGGGG |
| | | | | SQTVVTQEPSLTVSPGGTVTLTCGSSTGAVTSGNYPNWVQQKP |
| | | | | GQAPRGLIGGTKFLAPGTPARFSGSLLGGKAALTLSGVQPEDE |
| | | | | AEYYCVLWYSNRWVFGGGTKLTVLHHHHHH |
| 1321 | CDR-H1 of | artificial | AA | SYDMH |
| | CDH19 14054 | | | |
| 1322 | CDR-H2 of | artificial | AA | VISYDGTNEYYADSVKG |
| | CDH19 14054 | | | |
| 1323 | CDR-H3 of | artificial | AA | ERYFDWSFDY |
| | CDH19 14054 | | | |
| 1324 | CDR-L1 of | artificial | AA | RASQSVSNTYLA |
| | CDH19 14054 | | | |
| 1325 | CDR-L2 of | artificial | AA | GASSRAT |
| | CDH19 14054 | | | |
| 1326 | CDR-L3 of | artificial | AA | QQYSNSWT |
| | CDH19 14054 | | | |
| 1327 | VH of CDH19 | artificial | NT | CAGGTGCAGCTGGTGGAGTCTGGGGGAGGCGTGGTCCAGCCTG |
| | 14054 | | | GGGGGTCCCTGAGACTCTCCTGTGCAGCCTCTGGATTCACCTT |
| | | | | CAGTAGCTATGACATGCACTGGGTCCGCCAGGCTCCAGGCAAG |
| | | | | GGGCTGGAGTGGGTGGCAGTTATATCATATGATGGAACTAATG |
| | | | | AATACTATGCAGACTCCGTGAAGGGCCGATTCACCATCTCCAG |
| | | | | AGACACTTCCAAGAACACGCTGTATTTGCAAATGAACAGCCTG |
| | | | | AGAGCTGAGGACACGGCTGTATATTACTGTGCGAGAGAACGAT |
| | | | | ATTTTGACTGGTCTTTTGACTACTGGGGCCAGGGAACCCTGGT |
| | | | | CAGCGTCTCTAGT |
| 1328 | VH of CDH19 | artificial | AA | QVQLVESGGGVVQPGGSLRLSCAASGFTFSSYDMHWVRQAPGK |
| | 14054 | | | GLEWVAVISYDGTNEYYADSVKGRFTISRDTSKNTLYLQMNSL |
| | | | | RAEDTAVYYCARERYFDWSFDYWGQGTLVSVSS |
| 1329 | VL of CDH19 | artificial | NT | GAAATTGTATTGACGCAGTCTCCAGGCACCCTGTCTTTGTCTC |
| | 14054 | | | CAGGGGAAAGAGCCACCCTCTCCTGCAGGGCCAGTCAGAGTGT |
| | | | | TAGCAACACCTACTTAGCCTGGTACCAGCAGAGACCTGGCCAG |
| | | | | GCTCCCAGGCTCCTCATCTATGGTGCATCCAGCAGGGCCACTG |
| | | | | GCATCCCAGACAGATTCAGTGGCAGTGGGTCTGGGACAGACTT |
| | | | | CACTCTCACCATCAGCAGTCTGGAGCCTGAAGATTTTGCAGTG |
| | | | | TATTACTGTCAGCAGTACAGTAACTCGTGGACGTTCGGCCAAG |
| | | | | GGACCAAGGTGGAAATCAAA |
| 1330 | VL of CDH19 | artificial | AA | EIVLTQSPGTLSLSPGERATLSCRASQSVSNTYLAWYQQRPGQ |
| | 14054 | | | APRLLIYGASSRATGIPDRFSGSGSGTDFTLTISSLEPEDFAV |
| | | | | YYCQQYSNSWTFGQGTKVEIK |
| 1331 | VH-VL of | artificial | NT | CAGGTGCAGCTGGTGGAGTCTGGGGGAGGCGTGGTCCAGCCTG |
| | CDH19 14054 | | | GGGGGTCCCTGAGACTCTCCTGTGCAGCCTCTGGATTCACCTT |
| | | | | CAGTAGCTATGACATGCACTGGGTCCGCCAGGCTCCAGGCAAG |
| | | | | GGGCTGGAGTGGGTGGCAGTTATATCATATGATGGAACTAATG |
| | | | | AATACTATGCAGACTCCGTGAAGGGCCGATTCACCATCTCCAG |
| | | | | AGACACTTCCAAGAACACGCTGTATTTGCAAATGAACAGCCTG |
| | | | | AGAGCTGAGGACACGGCTGTATATTACTGTGCGAGAGAACGAT |
| | | | | ATTTTGACTGGTCTTTTGACTACTGGGGCCAGGGAACCCTGGT |
| | | | | CAGCGTCTCTAGTGGTGGCGGAGGATCTGGCGGAGGTGGAAGC |
| | | | | GGAGGCGGCGGATCTGAAATTGTATTGACGCAGTCTCCAGGCA |
| | | | | CCCTGTCTTTGTCTCCAGGGGAAAGAGCCACCCTCTCCTGCAG |
| | | | | GGCCAGTCAGAGTGTTAGCAACACCTACTTAGCCTGGTACCAG |
| | | | | CAGAGACCTGGCCAGGCTCCCAGGCTCCTCATCTATGGTGCAT |
| | | | | CCAGCAGGGCCACTGGCATCCCAGACAGATTCAGTGGCAGTGG |
| | | | | GTCTGGGACAGACTTCACTCTCACCATCAGCAGTCTGGAGCCT |
| | | | | GAAGATTTTGCAGTGTATTACTGTCAGCAGTACAGTAACTCGT |
| | | | | GGACGTTCGGCCAAGGGACCAAGGTGGAAATCAAA |
| 1332 | VH-VL of | artificial | AA | QVQLVESGGGVVQPGGSLRLSCAASGFTFSSYDMHWVRQAPGK |
| | CDH19 14054 | | | GLEWVAVISYDGTNEYYADSVKGRFTISRDTSKNTLYLQMNSL |
| | | | | RAEDTAVYYCARERYFDWSFDYWGQGTLVSVSSGGGGSGGGGS |
| | | | | GGGGSEIVLTQSPGTLSLSPGERATLSCRASQSVSNTYLAWYQ |
| | | | | QRPGQAPRLLIYGASSRATGIPDRFSGSGSGTDFTLTISSLEP |
| | | | | EDFAVYYCQQYSNSWTFGQGTKVEIK |
| 1333 | CDH19 14054 | artificial | | QVQLVESGGGVVQPGGSLRLSCAASGFTFSSYDMHWVRQAPGK |
| | x I2C | | | GLEWVAVISYDGTNEYYADSVKGRFTISRDTSKNTLYLQMNSL |
| | | | | RAEDTAVYYCARERYFDWSFDYWGQGTLVSVSSGGGGSGGGGS |
| | | | | GGGGSEIVLTQSPGTLSLSPGERATLSCRASQSVSNTYLAWYQ |
| | | | | QRPGQAPRLLIYGASSRATGIPDRFSGSGSGTDFTLTISSLEP |
| | | | | EDFAVYYCQQYSNSWTFGQGTKVEIKSGGGGSEVQLVESGGGL |
| | | | | VQPGGSLKLSCAASGFTFNKYAMNWVRQAPGKGLEWVARIRSK |
| | | | | YNNYATYYADSVKDRFTISRDDSKNTAYLQMNNLKTEDTAVYY |
| | | | | CVRHGNFGNSYISYWAYWGQGTLVTVSSGGGGSGGGGSGGGGS |
| | | | | QTVVTQEPSLTVSPGGTVTLTCGSSTGAVTSGNYPNWVQQKPG |
| | | | | QAPRGLIGGTKFLAPGTPARFSGSLLGGKAALTLSGVQPEDEA |
| | | | | EYYCVLWYSNRWVFGGGTKLTVLHHHHHH |
| 1334 | CDR-H1 of | artificial | AA | GYYWS |
| | CDH19 14056 | | | |
| 1335 | CDR-H2 of | artificial | AA | YFSYSGSTNYNPSLKS |
| | CDH19 14056 | | | |
| 1336 | CDR-H3 of | artificial | AA | NWAFHFDF |
| | CDH19 14056 | | | |
| 1337 | CDR-L1 of | artificial | AA | TGSSSNIGTGYAVH |
| | CDH19 14056 | | | |
| 1338 | CDR-L2 of | artificial | AA | GNNNRPS |
| | CDH19 14056 | | | |
| 1339 | CDR-L3 of | artificial | AA | QSYDSRLSGWV |
| | CDH19 14056 | | | |
| 1340 | VH of CDH19 | artificial | NT | CAGGTGCAGCTGCAGGAGTCGGGCCCAGGACTGGTGAAGCCTT |
| | 14056 | | | CGGAGACCCTGTCCCTCACCTGCACTGTCTCTGGTGGCTCCAT |
| | | | | CAGTGGTTACTACTGGAGCTGGATCCGGCAGCCCCCAGGAAAG |
| | | | | GGACTGGAGTGGTTTGCATATTTCTCTTACAGTGGGAGCACCA |
| | | | | ACTACAACCCCTCCCTCAAGAGTCGAGTCACCTTATCAGTAGA |
| | | | | CACGTCCAAGAACCAGTTCTCCCTGAAGCTGAGCTCTGTGACC |
| | | | | GCTGCGGACACGGCCGTGTATTACTGTGCGAGGAACTGGGCCT |
| | | | | TCCACTTTGACTTCTGGGGCCAGGGAACCCTGGTCACCGTCTC |
| | | | | TAGT |
| 1341 | VH of CDH19 | artificial | AA | QVQLQESGPGLVKPSETLSLTCTVSGGSISGYYWSWIRQPPGK |
| | 14056 | | | GLEWFAYFSYSGSTNYNPSLKSRVTLSVDTSKNQFSLKLSSVT |
| | | | | AADTAVYYCARNWAFHFDFWGQGTLVTVSS |
| 1342 | VL of CDH19 | artificial | NT | CAGTCTGTGCTGACGCAGCCGCCCTCAGTGTCTGGGGCCCCAG |
| | 14056 | | | GACAGAGGGTCACCATCTCCTGCACTGGGAGCAGCTCCAACAT |
| | | | | CGGGACAGGTTATGCTGTACACTGGTACCAGCAGCTTCCAGGA |
| | | | | ACAGCCCCCAAACTCCTCATCTATGGTAACAACAATCGGCCCT |
| | | | | CAGGGGTTCCTGACCGATTCTCTGGCTCCAAGTCTGGCACCTC |
| | | | | AGCCTCCCTGGCCATCACTGGGCTCCAGGCTGAGGATGAGGCT |
| | | | | GATTATTACTGCCAGTCCTATGACAGCAGACTGAGTGGTTGGG |
| | | | | TGTTCGGCGGAGGGACCAAGCTGACCGTCCTA |
| 1343 | VL of CDH19 | artificial | AA | QSVLTQPPSVSGAPGQRVTISCTGSSSNIGTGYAVHWYQQLPG |
| | 14056 | | | TAPKLLIYGNNNRPSGVPDRFSGSKSGTSASLAITGLQAEDEA |
| | | | | DYYCQSYDSRLSGWVFGGGTKLTVL |
| 1344 | VH-VL of | artificial | NT | CAGGTGCAGCTGCAGGAGTCGGGCCCAGGACTGGTGAAGCCTT |
| | CDH19 14056 | | | CGGAGACCCTGTCCCTCACCTGCACTGTCTCTGGTGGCTCCAT |
| | | | | CAGTGGTTACTACTGGAGCTGGATCCGGCAGCCCCCAGGAAAG |
| | | | | GGACTGGAGTGGTTTGCATATTTCTCTTACAGTGGGAGCACCA |
| | | | | ACTACAACCCCTCCCTCAAGAGTCGAGTCACCTTATCAGTAGA |
| | | | | CACGTCCAAGAACCAGTTCTCCCTGAAGCTGAGCTCTGTGACC |
| | | | | GCTGCGGACACGGCCGTGTATTACTGTGCGAGGAACTGGGCCT |
| | | | | TCCACTTTGACTTCTGGGGCCAGGGAACCCTGGTCACCGTCTC |
| | | | | TAGTGGTGGCGGAGGATCTGGCGGAGGTGGAAGCGGAGGCGGC |
| | | | | GGATCTCAGTCTGTGCTGACGCAGCCGCCCTCAGTGTCTGGGG |
| | | | | CCCCAGGACAGAGGGTCACCATCTCCTGCACTGGGAGCAGCTC |
| | | | | CAACATCGGGACAGGTTATGCTGTACACTGGTACCAGCAGCTT |
| | | | | CCAGGAACAGCCCCCAAACTCCTCATCTATGGTAACAACAATC |
| | | | | GGCCCTCAGGGGTTCCTGACCGATTCTCTGGCTCCAAGTCTGG |
| | | | | CACCTCAGCCTCCCTGGCCATCACTGGGCTCCAGGCTGAGGAT |
| | | | | GAGGCTGATTATTACTGCCAGTCCTATGACAGCAGACTGAGTG |
| | | | | GTTGGGTGTTCGGCGGAGGGACCAAGCTGACCGTCCTA |
| 1345 | VH-VL of | artificial | AA | QVQLQESGPGLVKPSETLSLTCTVSGGSISGYYWSWIRQPPGK |
| | CDH19 14056 | | | GLEWFAYFSYSGSTNYNPSLKSRVTLSVDTSKNQFSLKLSSVT |
| | | | | AADTAVYYCARNWAFHFDFWGQGTLVTVSSGGGGSGGGGSGGG |
| | | | | GSQSVLTQPPSVSGAPGQRVTISCTGSSSNIGTGYAVHWYQQL |
| | | | | PGTAPKLLIYGNNNRPSGVPDRFSGSKSGTSASLAITGLQAED |
| | | | | EADYYCQSYDSRLSGWVFGGGTKLTVL |
| 1346 | CDH19 14056 | artificial | | QVQLQESGPGLVKPSETLSLTCTVSGGSISGYYWSWIRQPPGK |
| | x I2C | | | GLEWFAYFSYSGSTNYNPSLKSRVTLSVDTSKNQFSLKLSSVT |
| | | | | AADTAVYYCARNWAFHFDFWGQGTLVTVSSGGGGSGGGGSGGG |
| | | | | GSQSVLTQPPSVSGAPGQRVTISCTGSSSNIGTGYAVHWYQQL |
| | | | | PGTAPKLLIYGNNNRPSGVPDRFSGSKSGTSASLAITGLQAED |
| | | | | EADYYCQSYDSRLSGWVFGGGTKLTVLSGGGGSEVQLVESGGG |
| | | | | LVQPGGSLKLSCAASGFTENKYAMNWVRQAPGKGLEWVARIRS |
| | | | | KYNNYATYYADSVKDRFTISRDDSKNTAYLQMNNLKTEDTAVY |
| | | | | YCVRHGNFGNSYISYWAYWGQGTLVTVSSGGGGSGGGGSGGGG |
| | | | | SQTVVTQEPSLTVSPGGTVTLTCGSSTGAVTSGNYPNWVQQKP |
| | | | | GQAPRGLIGGTKFLAPGTPARFSGSLLGGKAALTLSGVQPEDE |
| | | | | AEYYCVLWYSNRWVFGGGTKLTVLHHHHHH |
| 1347 | CDR-H1 of | artificial | AA | GYYWS |
| | CDH19 14057 | | | |
| 1348 | CDR-H2 of | artificial | AA | YFSYSGSTNYNPSLKS |
| | CDH19 14057 | | | |
| 1349 | CDR-H3 of | artificial | AA | NWAFHFDF |
| | CDH19 14057 | | | |
| 1350 | CDR-L1 of | artificial | AA | TGSSSNIGTGYAVH |
| | CDH19 14057 | | | |
| 1351 | CDR-L2 of | artificial | AA | GNNNRPS |
| | CDH19 14057 | | | |
| 1352 | CDR-L3 of | artificial | AA | QSYDSRLSGWV |
| | CDH19 14057 | | | |
| 1353 | VH of CDH19 | artificial | NT | CAGGTGCAGCTGCAGGAGTCGGGCCCAGGACTGGTGAAGCCTT |
| | 14057 | | | CGGAGACCCTGTCCCTCACCTGCACTGTCTCTGGTGGCTCCAT |
| | | | | CAGTGGTTACTACTGGAGCTGGATCCGGCAGCCCCCAGGAAAG |
| | | | | GGACTGGAGTGGATTGGATATTTCTCTTACAGTGGGAGCACCA |
| | | | | ACTACAACCCCTCCCTCAAGAGTCGAGTCACCTTATCAGTAGA |
| | | | | CACGTCCAAGAACCAGTTCTCCCTGAAGCTGAGCTCTGTGACC |
| | | | | GCTGCGGACACGGCCGTGTATTACTGTGCGAGGAACTGGGCCT |
| | | | | TCCACTTTGACTTCTGGGGCCAGGGAACCCTGGTCACCGTCTC |
| | | | | TAGT |
| 1354 | VH of CDH19 | artificial | AA | QVQLQESGPGLVKPSETLSLTCTVSGGSISGYYWSWIRQPPGK |
| | 14057 | | | GLEWIGYFSYSGSTNYNPSLKSRVTLSVDTSKNQFSLKLSSVT |
| | | | | AADTAVYYCARNWAFHFDFWGQGTLVTVSS |
| 1355 | VL of CDH19 | artificial | NT | CAGTCTGTGCTGACGCAGCCGCCCTCAGTGTCTGGGGCCCCAG |
| | 14057 | | | GACAGAGGGTCACCATCTCCTGCACTGGGAGCAGCTCCAACAT |
| | | | | CGGGACAGGTTATGCTGTACACTGGTACCAGCAGCTTCCAGGA |
| | | | | ACAGCCCCCAAACTCCTCATCTATGGTAACAACAATCGGCCCT |
| | | | | CAGGGGTTCCTGACCGATTCTCTGGCTCCAAGTCTGGCACCTC |
| | | | | AGCCTCCCTGGCCATCACTGGGCTCCAGGCTGAGGATGAGGCT |
| | | | | GATTATTACTGCCAGTCCTATGACAGCAGACTGAGTGGTTGGG |
| | | | | TGTTCGGCGGAGGGACCAAGCTGACCGTCCTA |
| 1356 | VL of CDH19 | artificial | AA | QSVLTQPPSVSGAPGQRVTISCTGSSSNIGTGYAVHWYQQLPG |
| | 14057 | | | TAPKLLIYGNNNRPSGVPDRFSGSKSGTSASLAITGLQAEDEA |
| | | | | DYYCQSYDSRLSGWVFGGGTKLTVL |
| 1357 | VH-VL of | artificial | NT | CAGGTGCAGCTGCAGGAGTCGGGCCCAGGACTGGTGAAGCCTT |
| | CDH19 14057 | | | CGGAGACCCTGTCCCTCACCTGCACTGTCTCTGGTGGCTCCAT |
| | | | | CAGTGGTTACTACTGGAGCTGGATCCGGCAGCCCCCAGGAAAG |
| | | | | GGACTGGAGTGGATTGGATATTTCTCTTACAGTGGGAGCACCA |
| | | | | ACTACAACCCCTCCCTCAAGAGTCGAGTCACCTTATCAGTAGA |
| | | | | CACGTCCAAGAACCAGTTCTCCCTGAAGCTGAGCTCTGTGACC |
| | | | | GCTGCGGACACGGCCGTGTATTACTGTGCGAGGAACTGGGCCT |
| | | | | TCCACTTTGACTTCTGGGGCCAGGGAACCCTGGTCACCGTCTC |
| | | | | TAGTGGTGGCGGAGGATCTGGCGGAGGTGGAAGCGGAGGCGGC |
| | | | | GGATCTCAGTCTGTGCTGACGCAGCCGCCCTCAGTGTCTGGGG |
| | | | | CCCCAGGACAGAGGGTCACCATCTCCTGCACTGGGAGCAGCTC |
| | | | | CAACATCGGGACAGGTTATGCTGTACACTGGTACCAGCAGCTT |
| | | | | CCAGGAACAGCCCCCAAACTCCTCATCTATGGTAACAACAATC |
| | | | | GGCCCTCAGGGGTTCCTGACCGATTCTCTGGCTCCAAGTCTGG |
| | | | | CACCTCAGCCTCCCTGGCCATCACTGGGCTCCAGGCTGAGGAT |
| | | | | GAGGCTGATTATTACTGCCAGTCCTATGACAGCAGACTGAGTG |
| | | | | GTTGGGTGTTCGGCGGAGGGACCAAGCTGACCGTCCTA |
| 1358 | VH-VL of | artificial | AA | QVQLQESGPGLVKPSETLSLTCTVSGGSISGYYWSWIRQPPGK |
| | CDH19 14057 | | | GLEWIGYFSYSGSTNYNPSLKSRVTLSVDTSKNQFSLKLSSVT |
| | | | | AADTAVYYCARNWAFHFDFWGQGTLVTVSSGGGGSGGGGSGGG |
| | | | | GSQSVLTQPPSVSGAPGQRVTISCTGSSSNIGTGYAVHWYQQL |
| | | | | PGTAPKLLIYGNNNRPSGVPDRFSGSKSGTSASLAITGLQAED |
| | | | | EADYYCQSYDSRLSGWVFGGGTKLTVL |
| 1359 | CDH19 14057 | artificial | AA | QVQLQESGPGLVKPSETLSLTCTVSGGSISGYYWSWIRQPPGK |
| | x I2C | | | GLEWIGYFSYSGSTNYNPSLKSRVTLSVDTSKNQFSLKLSSVT |
| | | | | AADTAVYYCARNWAFHFDFWGQGTLVTVSSGGGGSGGGGSGGG |
| | | | | GSQSVLTQPPSVSGAPGQRVTISCTGSSSNIGTGYAVHWYQQL |
| | | | | PGTAPKLLIYGNNNRPSGVPDRFSGSKSGTSASLAITGLQAED |
| | | | | EADYYCQSYDSRLSGWVFGGGTKLTVLSGGGGSEVQLVESGGG |
| | | | | LVQPGGSLKLSCAASGFTFNKYAMNWVRQAPGKGLEWVARIRS |
| | | | | KYNNYATYYADSVKDRFTISRDDSKNTAYLQMNNLKTEDTAVY |
| | | | | YCVRHGNFGNSYISYWAYWGQGTLVTVSSGGGGSGGGGSGGGG |
| | | | | SQTVVTQEPSLTVSPGGTVTLTCGSSTGAVTSGNYPNWVQQKP |
| | | | | GQAPRGLIGGTKFLAPGTPARFSGSLLGGKAALTLSGVQPEDE |
| | | | | AEYYCVLWYSNRWVFGGGTKLTVLHHHHHH |
| 1360 | CDR-H1 of | artificial | AA | SYSWS |
| | CDH19 14049 | | | |
| 1361 | CDR-H2 of | artificial | AA | YIYYSGSTNYNPSLKS |
| | CDH19 14049 | | | |
| 1362 | CDR-H3 of | artificial | AA | NWAFHFDY |
| | CDH19 14049 | | | |
| 1363 | CDR-L1 of | artificial | AA | TGSSSNIGTGYDVH |
| | CDH19 14049 | | | |
| 1364 | CDR-L2 of | artificial | AA | GNSNRPS |
| | CDH19 14049 | | | |
| 1365 | CDR-L3 of | artificial | AA | QSYDSSLSGWV |
| | CDH19 14049 | | | |
| 1366 | VH of CDH19 | artificial | NT | CAGGTGCAGCTGCAGGAGTCGGGCCCAGGACTGGTGAAGCCTT |
| | 14049 | | | CGGAGACCCTGTCCCTCACCTGCACTGTCTCTGGTGGCTCCAT |
| | | | | CAGTAGTTACTCCTGGAGCTGGATCCGGCAGCCCCCAGGGAAG |
| | | | | GGACTGGAGTGGATTGGGTATATCTATTACAGTGGGAGCACCA |
| | | | | ACTACAACCCCTCCCTCAAGAGTCGAGTCACCATATCATTAGA |
| | | | | CACGTCCAAGAACCAGTTCTCCCTGAAGCTGAGCTCTGTGACC |
| | | | | GCTGCGGACACGGCCGTGTATTACTGTGCGAGGAACTGGGCCT |
| | | | | TCCACTTTGACTACTGGGGCCAGGGAACCCTGGTCACCGTCTC |
| | | | | TAGT |
| 1367 | VH of CDH19 | artificial | AA | QVQLQESGPGLVKPSETLSLTCTVSGGSISSYSWSWIRQPPGK |
| | 14049 | | | GLEWIGYIYYSGSTNYNPSLKSRVTISLDTSKNQFSLKLSSVT |
| | | | | AADTAVYYCARNWAFHFDYWGQGTLVTVSS |
| 1368 | VL of CDH19 | artificial | NT | CAGTCTGTGCTGACGCAGCCGCCCTCAGTGTCTGGGGCCCCAG |
| | 14049 | | | GGCAGAGGGTCACCATCTCCTGCACTGGGAGCAGCTCCAATAT |
| | | | | CGGGACAGGTTATGATGTACACTGGTATCAGCAGCTTCCAGGA |
| | | | | ACAGCCCCCAAACTCCTCATCTATGGTAACAGCAATCGGCCCT |
| | | | | CAGGGGTCCCTGACCGATTCTCTGGCTCCAAGTCTGGCACCTC |
| | | | | AGCCTCCCTGGCCATCACTGGGCTCCAGGCTGAGGATGAGGCT |
| | | | | GATTATTACTGCCAGTCCTATGACAGCAGTCTGAGTGGTTGGG |
| | | | | TGTTCGGCGGAGGGACCAGGTTGACCGTCCTA |
| 1369 | VL of CDH19 | artificial | AA | QSVLTQPPSVSGAPGQRVTISCTGSSSNIGTGYDVHWYQQLPG |
| | 14049 | | | TAPKLLIYGNSNRPSGVPDRFSGSKSGTSASLAITGLQAEDEA |
| | | | | DYYCQSYDSSLSGWVFGGGTRLTVL |
| 1370 | VH-VL of | artificial | NT | CAGGTGCAGCTGCAGGAGTCGGGCCCAGGACTGGTGAAGCCTT |
| | CDH19 14049 | | | CGGAGACCCTGTCCCTCACCTGCACTGTCTCTGGTGGCTCCAT |
| | | | | CAGTAGTTACTCCTGGAGCTGGATCCGGCAGCCCCCAGGGAAG |
| | | | | GGACTGGAGTGGATTGGGTATATCTATTACAGTGGGAGCACCA |
| | | | | ACTACAACCCCTCCCTCAAGAGTCGAGTCACCATATCATTAGA |
| | | | | CACGTCCAAGAACCAGTTCTCCCTGAAGCTGAGCTCTGTGACC |
| | | | | GCTGCGGACACGGCCGTGTATTACTGTGCGAGGAACTGGGCCT |
| | | | | TCCACTTTGACTACTGGGGCCAGGGAACCCTGGTCACCGTCTC |
| | | | | TAGTGGTGGCGGAGGATCTGGCGGAGGTGGAAGCGGAGGCGGC |
| | | | | GGATCTCAGTCTGTGCTGACGCAGCCGCCCTCAGTGTCTGGGG |
| | | | | CCCCAGGGCAGAGGGTCACCATCTCCTGCACTGGGAGCAGCTC |
| | | | | CAATATCGGGACAGGTTATGATGTACACTGGTATCAGCAGCTT |
| | | | | CCAGGAACAGCCCCCAAACTCCTCATCTATGGTAACAGCAATC |
| | | | | GGCCCTCAGGGGTCCCTGACCGATTCTCTGGCTCCAAGTCTGG |
| | | | | CACCTCAGCCTCCCTGGCCATCACTGGGCTCCAGGCTGAGGAT |
| | | | | GAGGCTGATTATTACTGCCAGTCCTATGACAGCAGTCTGAGTG |
| | | | | GTTGGGTGTTCGGCGGAGGGACCAGGTTGACCGTCCTA |
| 1371 | VH-VL of | artificial | AA | QVQLQESGPGLVKPSETLSLTCTVSGGSISSYSWSWIRQPPGK |
| | CDH19 14049 | | | GLEWIGYIYYSGSTNYNPSLKSRVTISLDTSKNQFSLKLSSVT |
| | | | | AADTAVYYCARNWAFHFDYWGQGTLVTVSSGGGGSGGGGSGGG |
| | | | | GSQSVLTQPPSVSGAPGQRVTISCTGSSSNIGTGYDVHWYQQL |
| | | | | PGTAPKLLIYGNSNRPSGVPDRFSGSKSGTSASLAITGLQAED |
| | | | | EADYYCQSYDSSLSGWVFGGGTRLTVL |
| 1372 | CDH19 14049 | artificial | AA | QVQLQESGPGLVKPSETLSLTCTVSGGSISSYSWSWIRQPPGK |
| | x I2C | | | GLEWIGYIYYSGSTNYNPSLKSRVTISLDTSKNQFSLKLSSVT |
| | | | | AADTAVYYCARNWAFHFDYWGQGTLVTVSSGGGGSGGGGSGGG |
| | | | | GSQSVLTQPPSVSGAPGQRVTISCTGSSSNIGTGYDVHWYQQL |
| | | | | PGTAPKLLIYGNSNRPSGVPDRFSGSKSGTSASLAITGLQAED |
| | | | | EADYYCQSYDSSLSGWVFGGGTRLTVLSGGGGSEVQLVESGGG |
| | | | | LVQPGGSLKLSCAASGFTFNKYAMNWVRQAPGKGLEWVARIRS |
| | | | | KYNNYATYYADSVKDRFTISRDDSKNTAYLQMNNLKTEDTAVY |
| | | | | YCVRHGNFGNSYISYWAYWGQGTLVTVSSGGGGSGGGGSGGGG |
| | | | | SQTVVTQEPSLTVSPGGTVTLTCGSSTGAVTSGNYPNWVQQKP |
| | | | | GQAPRGLIGGTKFLAPGTPARFSGSLLGGKAALTLSGVQPEDE |
| | | | | AEYYCVLWYSNRWVFGGGTKLTVLHHHHHH |
| 1373 | CDR-H1 of | artificial | AA | SYGMH |
| | CDH19 14302 | | | |
| 1374 | CDR-H2 of | artificial | AA | FIWYDGSNKYYADSVKD |
| | CDH19 14302 | | | |
| 1375 | CDR-H3 of | artificial | AA | RAGIIGTIGYYYGMDV |
| | CDH19 14302 | | | |
| 1376 | CDR-L1 of | artificial | AA | SGDRLGEKYTS |
| | CDH19 14302 | | | |
| 1377 | CDR-L2 of | artificial | AA | QDTKRPS |
| | CDH19 14302 | | | |
| 1378 | CDR-L3 of | artificial | AA | QAWESSTVV |
| | CDH19 14302 | | | |
| 1379 | VH of CDH19 | artificial | NT | CAGGTGCAGTTGGTGGAGTCTGGGGGAGGCGTGGTCCAGCCTG |
| | 14302 | | | GGGGGTCCCTGAGACTCTCCTGTGCAGCGTCTGGATTCACCTT |
| | | | | CAGTAGCTATGGCATGCACTGGGTCCGCCAGGCTCCAGGCAAG |
| | | | | GGGCTGGAGTGGGTGGCATTTATATGGTATGATGGAAGTAATA |
| | | | | AATACTATGCAGACTCCGTGAAGGACCGATTCACCATCTCCAG |
| | | | | AGACAATTCCAAGAACACGCTGTATCTGCAAATGAATAGCCTG |
| | | | | AGAGCTGAGGACACGGCTGTGTATTACTGTGCGAGAAGGGCCG |
| | | | | GTATAATAGGAACTATAGGCTACTACTACGGTATGGACGTCTG |
| | | | | GGGCCAAGGGACCACGGTCACCGTCTCTAGT |
| 1380 | VH of CDH19 | artificial | AA | QVQLVESGGGVVQPGGSLRLSCAASGFTFSSYGMHWVRQAPGK |
| | 14302 | | | GLEWVAFIWYDGSNKYYADSVKDRFTISRDNSKNTLYLQMNSL |
| | | | | RAEDTAVYYCARRAGIIGTIGYYYGMDVWGQGTTVTVSS |
| 1381 | VL of CDH19 | artificial | nt | TCCTATGAACTGACTCAGCCACCCTCAGTGTCCGTGTCCCCAG |
| | 14302 | | | GACAGACAGCCAGCATCACCTGCTCTGGAGATAGGTTGGGGGA |
| | | | | AAAATATACTAGCTGGTATCAGCAGAGGCCAGGCCAGTCCCCT |
| | | | | TTGCTGGTCATCTATCAAGATACCAAGCGGCCCTCAGGGATCC |
| | | | | CTGAGCGATTCTCTGGCTCCAACTCTGGTAACACAGCCACTCT |
| | | | | GACCATCAGCGGGACCCAGGCTATGGATGAGGCTGACTATTAC |
| | | | | TGTCAGGCGTGGGAGAGCAGCACTGTGGTATTCGGCGGAGGGA |
| | | | | CCAAGCTGACCGTCCTA |
| 1382 | VL of CDH19 | artificial | AA | SYELTQPPSVSVSPGQTASITCSGDRLGEKYTSWYQQRPGQSP |
| | 14302 | | | LLVIYQDTKRPSGIPERFSGSNSGNTATLTISGTQAMDEADYY |
| | | | | CQAWESSTVVFGGGTKLTVL |
| 1383 | VH-VL of | artificial | nt | CAGGTGCAGTTGGTGGAGTCTGGGGGAGGCGTGGTCCAGCCTG |
| | CDH19 14302 | | | GGGGGTCCCTGAGACTCTCCTGTGCAGCGTCTGGATTCACCTT |
| | | | | CAGTAGCTATGGCATGCACTGGGTCCGCCAGGCTCCAGGCAAG |
| | | | | GGGCTGGAGTGGGTGGCATTTATATGGTATGATGGAAGTAATA |
| | | | | AATACTATGCAGACTCCGTGAAGGACCGATTCACCATCTCCAG |
| | | | | AGACAATTCCAAGAACACGCTGTATCTGCAAATGAATAGCCTG |
| | | | | AGAGCTGAGGACACGGCTGTGTATTACTGTGCGAGAAGGGCCG |
| | | | | GTATAATAGGAACTATAGGCTACTACTACGGTATGGACGTCTG |
| | | | | GGGCCAAGGGACCACGGTCACCGTCTCTAGTGGTGGCGGAGGA |
| | | | | TCTGGCGGAGGTGGAAGCGGAGGCGGCGGATCTTCCTATGAAC |
| | | | | TGACTCAGCCACCCTCAGTGTCCGTGTCCCCAGGACAGACAGC |
| | | | | CAGCATCACCTGCTCTGGAGATAGGTTGGGGGAAAAATATACT |
| | | | | AGCTGGTATCAGCAGAGGCCAGGCCAGTCCCCTTTGCTGGTCA |
| | | | | TCTATCAAGATACCAAGCGGCCCTCAGGGATCCCTGAGCGATT |
| | | | | CTCTGGCTCCAACTCTGGTAACACAGCCACTCTGACCATCAGC |
| | | | | GGGACCCAGGCTATGGATGAGGCTGACTATTACTGTCAGGCGT |
| | | | | GGGAGAGCAGCACTGTGGTATTCGGCGGAGGGACCAAGCTGAC |
| | | | | CGTCCTA |
| 1384 | VH-VL of | artificial | AA | QVQLVESGGGVVQPGGSLRLSCAASGFTFSSYGMHWVRQAPGK |
| | CDH19 14302 | | | GLEWVAFIWYDGSNKYYADSVKDRFTISRDNSKNTLYLQMNSL |
| | | | | RAEDTAVYYCARRAGIIGTIGYYYGMDVWGQGTTVTVSSGGGG |
| | | | | SGGGGSGGGGSSYELTQPPSVSVSPGQTASITCSGDRLGEKYT |
| | | | | SWYQQRPGQSPLLVIYQDTKRPSGIPERFSGSNSGNTATLTIS |
| | | | | GTQAMDEADYYCQAWESSTVVFGGGTKLTVL |
| 1385 | CDH19 14302 | artificial | aa | QVQLVESGGGVVQPGGSLRLSCAASGFTFSSYGMHWVRQAPGK |
| | x I2C | | | GLEWVAFIWYDGSNKYYADSVKDRFTISRDNSKNTLYLQMNSL |
| | | | | RAEDTAVYYCARRAGIIGTIGYYYGMDVWGQGTTVTVSSGGGG |
| | | | | SGGGGSGGGGSSYELTQPPSVSVSPGQTASITCSGDRLGEKYT |
| | | | | SWYQQRPGQSPLLVIYQDTKRPSGIPERFSGSNSGNTATLTIS |
| | | | | GTQAMDEADYYCQAWESSTVVFGGGTKLTVLSGGGGSEVQLVE |
| | | | | SGGGLVQPGGSLKLSCAASGFTFNKYAMNWVRQAPGKGLEWVA |
| | | | | RIRSKYNNYATYYADSVKDRFTISRDDSKNTAYLQMNNLKTED |
| | | | | TAVYYCVRHGNFGNSYISYWAYWGQGTLVTVSSGGGGSGGGGS |
| | | | | GGGGSQTVVTQEPSLTVSPGGTVTLTCGSSTGAVTSGNYPNWV |
| | | | | QQKPGQAPRGLIGGTKFLAPGTPARFSGSLLGGKAALTLSGVQ |
| | | | | PEDEAEYYCVLWYSNRWVFGGGTKLTVLHHHHHH |
| 1386 | CDR-H1 of | artificial | AA | SYGMH |
| | CDH19 14303 | | | |
| 1387 | CDR-H2 of | artificial | AA | FIWYEGSNKYYAESVKD |
| | CDH19 14303 | | | |
| 1388 | CDR-H3 of | artificial | AA | RAGIIGTIGYYYGMDV |
| | CDH19 14303 | | | |
| 1389 | CDR-L1 of | artificial | AA | SGDRLGEKYTS |
| | CDH19 14303 | | | |
| 1390 | CDR-L2 of | artificial | AA | QDTKRPS |
| | CDH19 14303 | | | |
| 1391 | CDR-L3 of | artificial | AA | QAWESSTVV |
| | CDH19 14303 | | | |
| 1392 | VH of CDH19 | artificial | nt | CAGGTGCAGTTGGTGGAGTCTGGGGGAGGCGTGGTCCAGCCTG |
| | 14303 | | | GGAGGTCCCTGAGACTCTCCTGTGCAGCGTCTGGATTCACCTT |
| | | | | CAGTAGCTATGGCATGCACTGGGTCCGCCAGGCTCCAGGCAAG |
| | | | | GGGCTGGAGTGGGTGGCATTTATATGGTATGAGGGAAGTAATA |
| | | | | AATACTATGCAGAGTCCGTGAAGGACCGATTCACCATCTCCAG |
| | | | | AGACAATTCCAAGAACACGCTGTATCTGCAAATGAAAAGCCTG |
| | | | | AGAGCTGAGGACACGGCTGTGTATTACTGTGCGAGAAGGGCCG |
| | | | | GTATAATAGGAACTATAGGCTACTACTACGGTATGGACGTCTG |
| | | | | GGGCCAAGGGACCACGGTCACCGTCTCTAGT |
| 1393 | VH of CDH19 | artificial | AA | QVQLVESGGGVVQPGRSLRLSCAASGFTFSSYGMHWVRQAPGK |
| | 14303 | | | GLEWVAFIWYEGSNKYYAESVKDRFTISRDNSKNTLYLQMKSL |
| | | | | RAEDTAVYYCARRAGIIGTIGYYYGMDVWGQGTTVTVSS |
| 1394 | VL of CDH19 | artificial | nt | TCCTATGAACTGACTCAGCCACCCTCAGTGTCCGTGTCCCCAG |
| | 14303 | | | GACAGACAGCCAGCATCACCTGCTCTGGAGATAGGTTGGGGGA |
| | | | | AAAATATACTAGCTGGTATCAGCAGAGGCCAGGCCAGTCCCCT |
| | | | | TTGCTGGTCATCTATCAAGATACCAAGCGGCCCTCAGGGATCC |
| | | | | CTGAGCGATTCTCTGGCTCCAACTCTGGTAACACAGCCACTCT |
| | | | | GACCATCAGCGGGACCCAGGCTATGGATGAGGCTGACTATTAC |
| | | | | TGTCAGGCGTGGGAGAGCAGCACTGTGGTATTCGGCGGAGGGA |
| | | | | CCAAGCTGACCGTCCTA |
| 1395 | VL of CDH19 | artificial | AA | SYELTQPPSVSVSPGQTASITCSGDRLGEKYTSWYQQRPGQSP |
| | 14303 | | | LLVIYQDTKRPSGIPERFSGSNSGNTATLTISGTQAMDEADYY |
| | | | | CQAWESSTVVFGGGTKLTVL |
| 1396 | VH-VL of | artificial | nt | CAGGTGCAGTTGGTGGAGTCTGGGGGAGGCGTGGTCCAGCCTG |
| | CDH19 14303 | | | GGAGGTCCCTGAGACTCTCCTGTGCAGCGTCTGGATTCACCTT |
| | | | | CAGTAGCTATGGCATGCACTGGGTCCGCCAGGCTCCAGGCAAG |
| | | | | GGGCTGGAGTGGGTGGCATTTATATGGTATGAGGGAAGTAATA |
| | | | | AATACTATGCAGAGTCCGTGAAGGACCGATTCACCATCTCCAG |
| | | | | AGACAATTCCAAGAACACGCTGTATCTGCAAATGAAAAGCCTG |
| | | | | AGAGCTGAGGACACGGCTGTGTATTACTGTGCGAGAAGGGCCG |
| | | | | GTATAATAGGAACTATAGGCTACTACTACGGTATGGACGTCTG |
| | | | | GGGCCAAGGGACCACGGTCACCGTCTCTAGTGGTGGCGGAGGA |
| | | | | TCTGGCGGAGGTGGAAGCGGAGGCGGCGGATCTTCCTATGAAC |
| | | | | TGACTCAGCCACCCTCAGTGTCCGTGTCCCCAGGACAGACAGC |
| | | | | CAGCATCACCTGCTCTGGAGATAGGTTGGGGGAAAAATATACT |
| | | | | AGCTGGTATCAGCAGAGGCCAGGCCAGTCCCCTTTGCTGGTCA |
| | | | | TCTATCAAGATACCAAGCGGCCCTCAGGGATCCCTGAGCGATT |
| | | | | CTCTGGCTCCAACTCTGGTAACACAGCCACTCTGACCATCAGC |
| | | | | GGGACCCAGGCTATGGATGAGGCTGACTATTACTGTCAGGCGT |
| | | | | GGGAGAGCAGCACTGTGGTATTCGGCGGAGGGACCAAGCTGAC |
| | | | | CGTCCTA |
| 1397 | VH-VL of | artificial | AA | QVQLVESGGGVVQPGRSLRLSCAASGFTFSSYGMHWVRQAPGK |
| | CDH19 14303 | | | GLEWVAFIWYEGSNKYYAESVKDRFTISRDNSKNTLYLQMKSL |
| | | | | RAEDTAVYYCARRAGIIGTIGYYYGMDVWGQGTTVTVSSGGGG |
| | | | | SGGGGSGGGGSSYELTQPPSVSVSPGQTASITCSGDRLGEKYT |
| | | | | SWYQQRPGQSPLLVIYQDTKRPSGIPERFSGSNSGNTATLTIS |
| | | | | GTQAMDEADYYCQAWESSTVVFGGGTKLTVL |
| 1398 | CDH19 14303 | artificial | aa | QVQLVESGGGVVQPGRSLRLSCAASGFTFSSYGMHWVRQAPGK |
| | x I2C | | | GLEWVAFIWYEGSNKYYAESVKDRFTISRDNSKNTLYLQMKSL |
| | | | | RAEDTAVYYCARRAGIIGTIGYYYGMDVWGQGTTVTVSSGGGG |
| | | | | SGGGGSGGGGSSYELTQPPSVSVSPGQTASITCSGDRLGEKYT |
| | | | | SWYQQRPGQSPLLVIYQDTKRPSGIPERFSGSNSGNTATLTIS |
| | | | | GTQAMDEADYYCQAWESSTVVFGGGTKLTVLSGGGGSEVQLVE |
| | | | | SGGGLVQPGGSLKLSCAASGFTFNKYAMNWVRQAPGKGLEWVA |
| | | | | RIRSKYNNYATYYADSVKDRFTISRDDSKNTAYLQMNNLKTED |
| | | | | TAVYYCVRHGNFGNSYISYWAYWGQGTLVTVSSGGGGSGGGGS |
| | | | | GGGGSQTVVTQEPSLTVSPGGTVTLTCGSSTGAVTSGNYPNWV |
| | | | | QQKPGQAPRGLIGGTKFLAPGTPARFSGSLLGGKAALTLSGVQ |
| | | | | PEDEAEYYCVLWYSNRWVFGGGTKLTVLHHHHHH |
| 1399 | CDR-H1 of | artificial | AA | RYGIH |
| | CDH19 14078 | | | |
| 1400 | CDR-H2 of | artificial | AA | VIWYDGSNKYYADSVKG |
| | CDH19 14078 | | | |
| 1401 | CDR-H3 of | artificial | AA | RAGIPGTTGYYYGMDV |
| | CDH19 14078 | | | |
| 1402 | CDR-L1 of | artificial | AA | SGDRLGEKYVS |
| | CDH19 14078 | | | |
| 1403 | CDR-L2 of | artificial | AA | QDNKWPS |
| | CDH19 14078 | | | |
| 1404 | CDR-L3 of | artificial | AA | QAWDSSTVV |
| | CDH19 14078 | | | |
| 1405 | VH of CDH19 | artificial | nt | CAGGTGCAGCTGGTGGAGTCTGGGGGAGGCGTGGTCCAGCCTG |
| | 14078 | | | GGGGGTCCCTGAGACTCTCCTGTGCAGCGTCTGGATTCACCTT |
| | | | | CAGTCGCTATGGCATACACTGGGTCCGCCAGGCTCCAGGCAAG |
| | | | | GGGCTGGAGTGGGTGGCAGTTATATGGTATGATGGAAGTAATA |
| | | | | AATACTATGCAGACTCCGTGAAGGGCCGATTCACCATCTCCAG |
| | | | | AGACAATTCCAAGAACACGCTGTATCTGCAAATGAACAGCCTG |
| | | | | AGAGCCGAGGACTCGGCTGTGTATTACTGTGCGAGAAGGGCCG |
| | | | | GTATACCTGGAACTACGGGCTACTACTATGGTATGGACGTCTG |
| | | | | GGGCCAAGGGACCACGGTCACCGTCTCCTCA |
| 1406 | VH of CDH19 | artificial | AA | QVQLVESGGGVVQPGGSLRLSCAASGFTFSRYGIHWVRQAPGK |
| | 14078 | | | GLEWVAVIWYDGSNKYYADSVKGRFTISRDNSKNTLYLQMNSL |
| | | | | RAEDSAVYYCARRAGIPGTTGYYYGMDVWGQGTTVTVSS |
| 1407 | VL of CDH19 | artificial | nt | TCCTATGAGCTGACTCAGCCACCCTCAGTGTCCGTGTCCCCAG |
| | 14078 | | | GACAGACAGCCAGCATCACCTGCTCTGGAGATAGATTGGGGGA |
| | | | | GAAATATGTTAGCTGGTATCAGCAGAAGCCAGGCCAGTCCCCT |
| | | | | ATACTGGTCATCTATCAAGATAATAAGTGGCCCTCAGGGATCC |
| | | | | CTGAGCGATTCTCTGGCTCCAACTCTGGGAACACAGCCACTCT |
| | | | | GACCATCAGCGGGACCCAGGCTATGGATGAGGCTGACTATTAC |
| | | | | TGTCAGGCGTGGGACAGCAGCACTGTGGTATTCGGCGGGGGGA |
| | | | | CCAAGCTGACCGTCCTA |
| 1408 | VL of CDH19 | artificial | AA | SYELTQPPSVSVSPGQTASITCSGDRLGEKYVSWYQQKPGQSP |
| | 14078 | | | ILVIYQDNKWPSGIPERFSGSNSGNTATLTISGTQAMDEADYY |
| | | | | CQAWDSSTVVFGGGTKLTVL |
| 1409 | VH-VL of | artificial | nt | CAGGTGCAGCTGGTGGAGTCTGGGGGAGGCGTGGTCCAGCCTG |
| | CDH19 14078 | | | GGGGGTCCCTGAGACTCTCCTGTGCAGCGTCTGGATTCACCTT |
| | | | | CAGTCGCTATGGCATACACTGGGTCCGCCAGGCTCCAGGCAAG |
| | | | | GGGCTGGAGTGGGTGGCAGTTATATGGTATGATGGAAGTAATA |
| | | | | AATACTATGCAGACTCCGTGAAGGGCCGATTCACCATCTCCAG |
| | | | | AGACAATTCCAAGAACACGCTGTATCTGCAAATGAACAGCCTG |
| | | | | AGAGCCGAGGACTCGGCTGTGTATTACTGTGCGAGAAGGGCCG |
| | | | | GTATACCTGGAACTACGGGCTACTACTATGGTATGGACGTCTG |
| | | | | GGGCCAAGGGACCACGGTCACCGTCTCCTCAGGTGGCGGAGGA |
| | | | | TCTGGCGGAGGTGGAAGCGGAGGCGGCGGATCTTCCTATGAGC |
| | | | | TGACTCAGCCACCCTCAGTGTCCGTGTCCCCAGGACAGACAGC |
| | | | | CAGCATCACCTGCTCTGGAGATAGATTGGGGGAGAAATATGTT |
| | | | | AGCTGGTATCAGCAGAAGCCAGGCCAGTCCCCTATACTGGTCA |
| | | | | TCTATCAAGATAATAAGTGGCCCTCAGGGATCCCTGAGCGATT |
| | | | | CTCTGGCTCCAACTCTGGGAACACAGCCACTCTGACCATCAGC |
| | | | | GGGACCCAGGCTATGGATGAGGCTGACTATTACTGTCAGGCGT |
| | | | | GGGACAGCAGCACTGTGGTATTCGGCGGGGGGACCAAGCTGAC |
| | | | | CGTCCTA |
| 1410 | VH-VL of | artificial | AA | QVQLVESGGGVVQPGGSLRLSCAASGFTFSRYGIHWVRQAPGK |
| | CDH19 14078 | | | GLEWVAVIWYDGSNKYYADSVKGRFTISRDNSKNTLYLQMNSL |
| | | | | RAEDSAVYYCARRAGIPGTTGYYYGMDVWGQGTTVTVSSGGGG |
| | | | | SGGGGSGGGGSSYELTQPPSVSVSPGQTASITCSGDRLGEKYV |
| | | | | SWYQQKPGQSPILVIYQDNKWPSGIPERFSGSNSGNTATLTIS |
| | | | | GTQAMDEADYYCQAWDSSTVVFGGGTKLTVL |
| 1411 | CDH19 14078 | artificial | aa | QVQLVESGGGVVQPGGSLRLSCAASGFTFSRYGIHWVRQAPGK |
| | x I2C | | | GLEWVAVIWYDGSNKYYADSVKGRFTISRDNSKNTLYLQMNSL |
| | | | | RAEDSAVYYCARRAGIPGTTGYYYGMDVWGQGTTVTVSSGGGG |
| | | | | SGGGGSGGGGSSYELTQPPSVSVSPGQTASITCSGDRLGEKYV |
| | | | | SWYQQKPGQSPILVIYQDNKWPSGIPERFSGSNSGNTATLTIS |
| | | | | GTQAMDEADYYCQAWDSSTVVFGGGTKLTVLSGGGGSEVQLVE |
| | | | | SGGGLVQPGGSLKLSCAASGFTFNKYAMNWVRQAPGKGLEWVA |
| | | | | RIRSKYNNYATYYADSVKDRFTISRDDSKNTAYLQMNNLKTED |
| | | | | TAVYYCVRHGNFGNSYISYWAYWGQGTLVTVSSGGGGSGGGGS |
| | | | | GGGGSQTVVTQEPSLTVSPGGTVTLTCGSSTGAVTSGNYPNWV |
| | | | | QQKPGQAPRGLIGGTKFLAPGTPARFSGSLLGGKAALTLSGVQ |
| | | | | PEDEAEYYCVLWYSNRWVFGGGTKLTVLHHHHHH |
| 1412 | CDR-H1 of | artificial | AA | RYGIH |
| | CDH19 14080 | | | |
| 1413 | CDR-H2 of | artificial | AA | VIWYDGSNKYYADSVKG |
| | CDH19 14080 | | | |
| 1414 | CDR-H3 of | artificial | AA | RAGIPGTTGYYYGMDV |
| | CDH19 14080 | | | |
| 1415 | CDR-L1 of | artificial | AA | SGDRLGEKYVY |
| | CDH19 14080 | | | |
| 1416 | CDR-L2 of | artificial | AA | QDNKWPS |
| | CDH19 14080 | | | |
| 1417 | CDR-L3 of | artificial | AA | QAWDSSTVV |
| | CDH19 14080 | | | |
| 1418 | VH of CDH19 | artificial | nt | CAGGTGCAGCTGGTGGAGTCTGGGGGAGGCGTGGTCCAGCCTG |
| | 14080 | | | GGAGGTCCCTGAGACTCTCCTGTGCAGCGTCTGGATTCACCTT |
| | | | | CAGTCGCTATGGCATACACTGGGTCCGCCAGGCTCCAGGCAAG |
| | | | | GGGCTGGAGTGGGTGGCAGTTATATGGTATGATGGAAGTAATA |
| | | | | AATACTATGCAGACTCCGTGAAGGGCCGATTCACCATCTCCAG |
| | | | | AGACAATTCCAAGAACACGCTGTATCTGCTAATGAACAGCCTG |
| | | | | AGAGCCGAGGACTCGGCTGTGTATTACTGTGCGAGAAGGGCCG |
| | | | | GTATACCTGGAACTACGGGCTACTACTATGGTATGGACGTCTG |
| | | | | GGGCCAAGGGACCACGGTCACCGTCTCCTCA |
| 1419 | VH of CDH19 | artificial | AA | QVQLVESGGGVVQPGRSLRLSCAASGFTFSRYGIHWVRQAPGK |
| | 14080 | | | GLEWVAVIWYDGSNKYYADSVKGRFTISRDNSKNTLYLLMNSL |
| | | | | RAEDSAVYYCARRAGIPGTTGYYYGMDVWGQGTTVTVSS |
| 1420 | VL of CDH19 | artificial | nt | TCCTATGAGCTGACTCAGCCACCCTCAGTGTCCGTGTCCCCAG |
| | 14080 | | | GACAGACAGCCAGCATCACCTGCTCTGGAGATAGATTGGGGGA |
| | | | | GAAATATGTTTACTGGTATCAGCAGAAGCCAGGCCAGTCCCCT |
| | | | | ATACTGGTCATCTATCAAGATAATAAGTGGCCCTCAGGGATCC |
| | | | | CTGAGCGATTCTCTGGCTCCAACTCTGGGAACACAGCCACTCT |
| | | | | GACCATCAGCGGGACCCAGGCTATGGATGAGGCTGACTATTAC |
| | | | | TGTCAGGCGTGGGACAGCAGCACTGTGGTATTCGGCGGGGGGA |
| | | | | CCAAGCTGACCGTCCTA |
| 1421 | VL of CDH19 | artificial | AA | SYELTQPPSVSVSPGQTASITCSGDRLGEKYVYWYQQKPGQSP |
| | 14080 | | | ILVIYQDNKWPSGIPERFSGSNSGNTATLTISGTQAMDEADYY |
| | | | | CQAWDSSTVVFGGGTKLTVL |
| 1422 | VH-VL of | artificial | nt | CAGGTGCAGCTGGTGGAGTCTGGGGGAGGCGTGGTCCAGCCTG |
| | CDH19 14080 | | | GGAGGTCCCTGAGACTCTCCTGTGCAGCGTCTGGATTCACCTT |
| | | | | CAGTCGCTATGGCATACACTGGGTCCGCCAGGCTCCAGGCAAG |
| | | | | GGGCTGGAGTGGGTGGCAGTTATATGGTATGATGGAAGTAATA |
| | | | | AATACTATGCAGACTCCGTGAAGGGCCGATTCACCATCTCCAG |
| | | | | AGACAATTCCAAGAACACGCTGTATCTGCTAATGAACAGCCTG |
| | | | | AGAGCCGAGGACTCGGCTGTGTATTACTGTGCGAGAAGGGCCG |
| | | | | GTATACCTGGAACTACGGGCTACTACTATGGTATGGACGTCTG |
| | | | | GGGCCAAGGGACCACGGTCACCGTCTCCTCAGGTGGCGGAGGA |
| | | | | TCTGGCGGAGGTGGAAGCGGAGGCGGCGGATCTTCCTATGAGC |
| | | | | TGACTCAGCCACCCTCAGTGTCCGTGTCCCCAGGACAGACAGC |
| | | | | CAGCATCACCTGCTCTGGAGATAGATTGGGGGAGAAATATGTT |
| | | | | TACTGGTATCAGCAGAAGCCAGGCCAGTCCCCTATACTGGTCA |
| | | | | TCTATCAAGATAATAAGTGGCCCTCAGGGATCCCTGAGCGATT |
| | | | | CTCTGGCTCCAACTCTGGGAACACAGCCACTCTGACCATCAGC |
| | | | | GGGACCCAGGCTATGGATGAGGCTGACTATTACTGTCAGGCGT |
| | | | | GGGACAGCAGCACTGTGGTATTCGGCGGGGGGACCAAGCTGAC |
| | | | | CGTCCTA |
| 1423 | VH-VL of | artificial | AA | QVQLVESGGGVVQPGRSLRLSCAASGFTFSRYGIHWVRQAPGK |
| | CDH19 14080 | | | GLEWVAVIWYDGSNKYYADSVKGRFTISRDNSKNTLYLLMNSL |
| | | | | RAEDSAVYYCARRAGIPGTTGYYYGMDVWGQGTTVTVSSGGGG |
| | | | | SGGGGSGGGGSSYELTQPPSVSVSPGQTASITCSGDRLGEKYV |
| | | | | YWYQQKPGQSPILVIYQDNKWPSGIPERFSGSNSGNTATLTIS |
| | | | | GTQAMDEADYYCQAWDSSTVVFGGGTKLTVL |
| 1424 | CDH19 14080 | artificial | aa | QVQLVESGGGVVQPGRSLRLSCAASGFTFSRYGIHWVRQAPGK |
| | x I2C | | | GLEWVAVIWYDGSNKYYADSVKGRFTISRDNSKNTLYLLMNSL |
| | | | | RAEDSAVYYCARRAGIPGTTGYYYGMDVWGQGTTVTVSSGGGG |
| | | | | SGGGGSGGGGSSYELTQPPSVSVSPGQTASITCSGDRLGEKYV |
| | | | | YWYQQKPGQSPILVIYQDNKWPSGIPERFSGSNSGNTATLTIS |
| | | | | GTQAMDEADYYCQAWDSSTVVFGGGTKLTVLSGGGGSEVQLVE |
| | | | | SGGGLVQPGGSLKLSCAASGFTFNKYAMNWVRQAPGKGLEWVA |
| | | | | RIRSKYNNYATYYADSVKDRFTISRDDSKNTAYLQMNNLKTED |
| | | | | TAVYYCVRHGNFGNSYISYWAYWGQGTLVTVSSGGGGSGGGGS |
| | | | | GGGGSQTVVTQEPSLTVSPGGTVTLTCGSSTGAVTSGNYPNWV |
| | | | | QQKPGQAPRGLIGGTKFLAPGTPARFSGSLLGGKAALTLSGVQ |
| | | | | PEDEAEYYCVLWYSNRWVFGGGTKLTVLHHHHHH |
| 1425 | CDR-H1 of | artificial | AA | SYSWS |
| | CDH19 13591 | | | |
| 1426 | CDR-H2 of | artificial | AA | YIYYSGSTNYNPSLKS |
| | CDH19 13591 | | | |
| 1427 | CDR-H3 of | artificial | AA | NWAFHFDY |
| | CDH19 13591 | | | |
| 1428 | CDR-L1 of | artificial | AA | TGSSSNIGTGYDVH |
| | CDH19 13591 | | | |
| 1429 | CDR-L2 of | artificial | AA | GNSNRPS |
| | CDH19 13591 | | | |
| 1430 | CDR-L3 of | artificial | AA | QSYDSSLSGWV |
| | CDH19 13591 | | | |
| 1431 | VH of CDH19 | artificial | NT | CAGGTGCAGCTGCAGGAGTCGGGCCCAGGACTGGTGAAGCCTT |
| | 13591 | | | CGGAGACCCTGTCCCTCACCTGCACTGTCTCTGGTGGCTCCAT |
| | | | | CAGTAGTTACTCCTGGAGCTGGATCCGGCAGCCCCCAGGGAAG |
| | | | | GGACTGGAGTGGATTGGGTATATCTATTACAGTGGGAGCACCA |
| | | | | ACTACAACCCCTCCCTCAAGAGTCGAGTCACCATATCATTAGA |
| | | | | CACGTCCAAGAACCAGTTCTCCCTGAAGCTGAGCTCTGTGACC |
| | | | | GCTGCGGACACGGCCGTGTATTACTGTGCGAGGAACTGGGCCT |
| | | | | TCCACTTTGACTACTGGGGCCAGGGAACCCTGGTCACCGTCTC |
| | | | | TAGT |
| 1432 | VH of CDH19 | artificial | AA | QVQLQESGPGLVKPSETLSLTCTVSGGSISSYSWSWIRQPPGK |
| | 13591 | | | GLEWIGYIYYSGSTNYNPSLKSRVTISLDTSKNQFSLKLSSVT |
| | | | | AADTAVYYCARNWAFHFDYWGQGTLVTVSS |
| 1433 | VL of CDH19 | artificial | NT | CAGTCTGTGCTGACGCAGCCGCCCTCAGTGTCTGGGGCCCCAG |
| | 13591 | | | GGCAGAGGGTCACCATCTCCTGCACTGGGAGCAGCTCCAATAT |
| | | | | CGGGACAGGTTATGATGTACACTGGTATCAGCAGCTTCCAGGA |
| | | | | ACAGCCCCCAAACTCCTCATCCATGGTAACAGCAATCGGCCCT |
| | | | | CAGGGGTCCCTGACCGATTCTCTGGCTCCAAGTCTGGCACCTC |
| | | | | AGCCTCCCTGGCCATCACTGGGCTCCAGGCTGAGGATGAGGCT |
| | | | | GATTATTACTGCCAGTCCTATGACAGCAGTCTGAGTGGTTGGG |
| | | | | TGTTCGGCGGAGGGACCAGGTTGACCGTCCTA |
| 1434 | VL of CDH19 | artificial | AA | QSVLTQPPSVSGAPGQRVTISCTGSSSNIGTGYDVHWYQQLPG |
| | 13591 | | | TAPKLLIHGNSNRPSGVPDRFSGSKSGTSASLAITGLQAEDEA |
| | | | | DYYCQSYDSSLSGWVFGGGTRLTVL |
| 1435 | VH-VL of | artificial | NT | CAGGTGCAGCTGCAGGAGTCGGGCCCAGGACTGGTGAAGCCTT |
| | CDH19 1591 | | | CGGAGACCCTGTCCCTCACCTGCACTGTCTCTGGTGGCTCCAT |
| | | | | CAGTAGTTACTCCTGGAGCTGGATCCGGCAGCCCCCAGGGAAG |
| | | | | GGACTGGAGTGGATTGGGTATATCTATTACAGTGGGAGCACCA |
| | | | | ACTACAACCCCTCCCTCAAGAGTCGAGTCACCATATCATTAGA |
| | | | | CACGTCCAAGAACCAGTTCTCCCTGAAGCTGAGCTCTGTGACC |
| | | | | GCTGCGGACACGGCCGTGTATTACTGTGCGAGGAACTGGGCCT |
| | | | | TCCACTTTGACTACTGGGGCCAGGGAACCCTGGTCACCGTCTC |
| | | | | TAGTGGTGGCGGAGGATCTGGCGGAGGTGGAAGCGGAGGCGGC |
| | | | | GGATCTCAGTCTGTGCTGACGCAGCCGCCCTCAGTGTCTGGGG |
| | | | | CCCCAGGGCAGAGGGTCACCATCTCCTGCACTGGGAGCAGCTC |
| | | | | CAATATCGGGACAGGTTATGATGTACACTGGTATCAGCAGCTT |
| | | | | CCAGGAACAGCCCCCAAACTCCTCATCCATGGTAACAGCAATC |
| | | | | GGCCCTCAGGGGTCCCTGACCGATTCTCTGGCTCCAAGTCTGG |
| | | | | CACCTCAGCCTCCCTGGCCATCACTGGGCTCCAGGCTGAGGAT |
| | | | | GAGGCTGATTATTACTGCCAGTCCTATGACAGCAGTCTGAGTG |
| | | | | GTTGGGTGTTCGGCGGAGGGACCAGGTTGACCGTCCTA |
| 1436 | VH-VL of | artificial | AA | QVQLQESGPGLVKPSETLSLTCTVSGGSISSYSWSWIRQPPGK |
| | CDH19 13591 | | | GLEWIGYIYYSGSTNYNPSLKSRVTISLDTSKNQFSLKLSSVT |
| | | | | AADTAVYYCARNWAFHFDYWGQGTLVTVSSGGGGSGGGGSGGG |
| | | | | GSQSVLTQPPSVSGAPGQRVTISCTGSSSNIGTGYDVHWYQQL |
| | | | | PGTAPKLLIHGNSNRPSGVPDRFSGSKSGTSASLAITGLQAED |
| | | | | EADYYCQSYDSSLSGWVFGGGTRLTVL |
| 1437 | CDH19 13591 | artificial | AA | QVQLQESGPGLVKPSETLSLTCTVSGGSISSYSWSWIRQPPGK |
| | x I2C | | | GLEWIGYIYYSGSTNYNPSLKSRVTISLDTSKNQFSLKLSSVT |
| | | | | AADTAVYYCARNWAFHFDYWGQGTLVTVSSGGGGSGGGGSGGG |
| | | | | GSQSVLTQPPSVSGAPGQRVTISCTGSSSNIGTGYDVHWYQQL |
| | | | | PGTAPKLLIHGNSNRPSGVPDRFSGSKSGTSASLAITGLQAED |
| | | | | EADYYCQSYDSSLSGWVFGGGTRLTVLSGGGGSEVQLVESGGG |
| | | | | LVQPGGSLKLSCAASGFTFNKYAMNWVRQAPGKGLEWVARIRS |
| | | | | KYNNYATYYADSVKDRFTISRDDSKNTAYLQMNNLKTEDTAVY |
| | | | | YCVRHGNFGNSYISYWAYWGQGTLVTVSSGGGGSGGGGSGGGG |
| | | | | SQTVVTQEPSLTVSPGGTVTLTCGSSTGAVTSGNYPNWVQQKP |
| | | | | GQAPRGLIGGTKFLAPGTPARFSGSLLGGKAALTLSGVQPEDE |
| | | | | AEYYCVLWYSNRWVFGGGTKLTVLHHHHHH |
| 1438 | CDR-H1 of | artificial | AA | SYSWS |
| | CDH19 14299 | | | |
| 1439 | CDR-H2 of | artificial | AA | YIYYSGSTNYNPSLKS |
| | CDH19 14299 | | | |
| 1440 | CDR-H3 of | artificial | AA | NWAFHFDY |
| | CDH19 14299 | | | |
| 1441 | CDR-L1 of | artificial | AA | TGSSSNIGTGYDVH |
| | CDH19 14299 | | | |
| 1442 | CDR-L2 of | artificial | AA | GNSNRPS |
| | CDH19 14299 | | | |
| 1443 | CDR-L3 of | artificial | AA | QSYDSSLSGWV |
| | CDH19 14299 | | | |
| 1444 | VH of CDH19 | artificial | NT | CAGGTGCAGCTGCAGGAGTCGGGCCCAGGACTGGTGAAGCCTT |
| | 14299 | | | CGGAGACCCTGTCCCTCACCTGCACTGTCTCTGGTGGCTCCAT |
| | | | | CAGTAGTTACTCCTGGAGCTGGATCCGGCAGCCCCCAGGGAAG |
| | | | | GGACTGGAGTGGATTGGGTATATCTATTACAGTGGGAGCACCA |
| | | | | ACTACAACCCCTCCCTCAAGAGTCGAGTCACCATATCATTAGA |
| | | | | CACGTCCAAGAACCAGTTCTCCCTGAAGCTGAGCTCTGTGACC |
| | | | | GCTGCGGACACGGCCGTGTATTACTGTGCGAGGAACTGGGCCT |
| | | | | TCCACTTTGACTACTGGGGCCAGGGAACCCTGGTCACCGTCTC |
| | | | | TAGT |
| 1445 | VH of CDH19 | artificial | AA | QVQLQESGPGLVKPSETLSLTCTVSGGSISSYSWSWIRQPPGK |
| | 14299 | | | GLEWIGYIYYSGSTNYNPSLKSRVTISLDTSKNQFSLKLSSVT |
| | | | | AADTAVYYCARNWAFHFDYWGQGTLVTVSS |
| 1446 | VL of CDH19 | artificial | NT | CAGTCTGTGCTGACGCAGCCGCCCTCAGTGTCTGGGGCCCCAG |
| | 14299 | | | GGCAGAGGGTCACCATCTCCTGCACTGGGAGCAGCTCCAATAT |
| | | | | CGGGACAGGTTATGATGTACACTGGTATCAGCAGCTTCCAGGA |
| | | | | ACAGCCCCCAAACTCCTCATCCATGGTAACAGCAATCGGCCCT |
| | | | | CAGGGGTCCCTGACCGATTCTCTGGCTCCAAGTCTGGCACCTC |
| | | | | AGCCTCCCTGGCCATCACTGGGCTCCAGGCTGAGGATGAGGCT |
| | | | | GATTATTACTGCCAGTCCTATGACAGCAGTCTGAGTGGTTGGG |
| | | | | TGTTCGGCGGAGGGACCAGGTTGACCGTCCTA |
| 1447 | VL of CDH19 | artificial | AA | QSVLTQPPSVSGAPGQRVTISCTGSSSNIGTGYDVHWYQQLPG |
| | 14299 | | | TAPKLLIHGNSNRPSGVPDRFSGSKSGTSASLAITGLQAEDEA |
| | | | | DYYCQSYDSSLSGWVFGGGTRLTVL |
| 1448 | VH-VL of | artificial | NT | CAGGTGCAGCTGCAGGAGTCGGGCCCAGGACTGGTGAAGCCTT |
| | CDH19 14299 | | | CGGAGACCCTGTCCCTCACCTGCACTGTCTCTGGTGGCTCCAT |
| | | | | CAGTAGTTACTCCTGGAGCTGGATCCGGCAGCCCCCAGGGAAG |
| | | | | GGACTGGAGTGGATTGGGTATATCTATTACAGTGGGAGCACCA |
| | | | | ACTACAACCCCTCCCTCAAGAGTCGAGTCACCATATCATTAGA |
| | | | | CACGTCCAAGAACCAGTTCTCCCTGAAGCTGAGCTCTGTGACC |
| | | | | GCTGCGGACACGGCCGTGTATTACTGTGCGAGGAACTGGGCCT |
| | | | | TCCACTTTGACTACTGGGGCCAGGGAACCCTGGTCACCGTCTC |
| | | | | TAGTGGTGGCGGAGGATCTGGCGGAGGTGGAAGCGGAGGCGGC |
| | | | | GGATCTCAGTCTGTGCTGACGCAGCCGCCCTCAGTGTCTGGGG |
| | | | | CCCCAGGGCAGAGGGTCACCATCTCCTGCACTGGGAGCAGCTC |
| | | | | CAATATCGGGACAGGTTATGATGTACACTGGTATCAGCAGCTT |
| | | | | CCAGGAACAGCCCCCAAACTCCTCATCCATGGTAACAGCAATC |
| | | | | GGCCCTCAGGGGTCCCTGACCGATTCTCTGGCTCCAAGTCTGG |
| | | | | CACCTCAGCCTCCCTGGCCATCACTGGGCTCCAGGCTGAGGAT |
| | | | | GAGGCTGATTATTACTGCCAGTCCTATGACAGCAGTCTGAGTG |
| | | | | GTTGGGTGTTCGGCGGAGGGACCAGGTTGACCGTCCTA |
| 1449 | VH-VL of | artificial | AA | QVQLQESGPGLVKPSETLSLTCTVSGGSISSYSWSWIRQPPGK |
| | CDH19 14299 | | | GLEWIGYIYYSGSTNYNPSLKSRVTISLDTSKNQFSLKLSSVT |
| | | | | AADTAVYYCARNWAFHFDYWGQGTLVTVSSGGGGSGGGGSGGG |
| | | | | GSQSVLTQPPSVSGAPGQRVTISCTGSSSNIGTGYDVHWYQQL |
| | | | | PGTAPKLLIHGNSNRPSGVPDRFSGSKSGTSASLAITGLQAED |
| | | | | EADYYCQSYDSSLSGWVFGGGTRLTVL |
| 1450 | CDH19 14299 | artificial | AA | QVQLQESGPGLVKPSETLSLTCTVSGGSISSYSWSWIRQPPGK |
| | x I2C | | | GLEWIGYIYYSGSTNYNPSLKSRVTISLDTSKNQFSLKLSSVT |
| | | | | AADTAVYYCARNWAFHFDYWGQGTLVTVSSGGGGSGGGGSGGG |
| | | | | GSQSVLTQPPSVSGAPGQRVTISCTGSSSNIGTGYDVHWYQQL |
| | | | | PGTAPKLLIHGNSNRPSGVPDRFSGSKSGTSASLAITGLQAED |
| | | | | EADYYCQSYDSSLSGWVFGGGTRLTVLSGGGGSEVQLVESGGG |
| | | | | LVQPGGSLKLSCAASGETENKYAMNWVRQAPGKGLEWVARIRS |
| | | | | KYNNYATYYADSVKDRFTISRDDSKNTAYLQMNNLKTEDTAVY |
| | | | | YCVRHGNFGNSYISYWAYWGQGTLVTVSSGGGGSGGGGSGGGG |
| | | | | SQTVVTQEPSLTVSPGGTVTLTCGSSTGAVTSGNYPNWVQQKP |
| | | | | GQAPRGLIGGTKFLAPGTPARFSGSLLGGKAALTLSGVQPEDE |
| | | | | AEYYCVLWYSNRWVFGGGTKLTVLHHHHHH |
| 1451 | ckCDH19(1-43) | artificial | aa | MNCSTFLSLVLALVQLQLCSPTTQIFSAQKTDQSYTTIRRVKR |
| | ::FLAG:: | | | DYKDDDDKGWVWEPLFVTEEETSTMPMYVGQLKSDLDKEDGSL |
| | ckCDH19(44-776) | | | QYILTGEGADSIFFINEHGKIYVRQKLDREKKSFYILRAQVIN |
| | | | | RKTRHPIEPDSEFIIKVRDINDHEPQFLDGPYVATVPEMSPEG |
| | | | | TSVTQVTATDGDDPSYGNNARLLYSLIQGQPYFSVEPKTGVIR |
| | | | | MTSQMDRETKDQYLVVIQAKDMVGQAGAFSATATVTINLSDVN |
| | | | | DNPPKFQQRLYYLNVSEEAPVGTTVGRLLAEDSDIGENAAMNY |
| | | | | FIEEDSSDVFGIITDRETQEGIIILKKRVDYESKRKHSVRVKA |
| | | | | VNRYIDDRFLKEGPFEDITIVQISVVDADEPPVFTLESYVMEI |
| | | | | AEGVVSGSLVGTVSARDLDNDDSSVRYSIVQGLHLKRLFSINE |
| | | | | HNGTIITTEPLDREKASWHNITVTATETRNPEKISEANVYIQV |
| | | | | LDVNDHAPEFSKYYETFVCENAVPGQLIQNISAVDKDDSAENH |
| | | | | RFYFSLAQATNSSHFTVKDNQDNTAGIFTAGSGFSRKEQFYFF |
| | | | | LPILILDNGSPPLTSTNTLTVTVCDCDTEVNTLYCRYGAFLYS |
| | | | | IGLSTEALVAVLACLLILLVFFLAIIGIRQQRKKTLFSEKVEE |
| | | | | FRENIVRYDDEGGGEEDTEAFDISALRTRAVLRTHKPRKKITT |
| | | | | EIHSLYRQSLQVGPDSAIFRQFISEKLEEANTDPSVPPYDSLQ |
| | | | | TYAFEGTGSLAGSLSSLGSNTSDVDQNYEYLVGWGPPFKQLAG |
| | | | | MYTSQRSTRD |
| 1452 | huCDH19(1-43) | artificial | aa | MNCYLLLRFMLGIPLLWPCLGATENSQTKKVKQPVRSHLRVKR |
| | ::FLAG::hu | | | DYKDDDDKGWVWNQFFVPEEMNTTSHHIGQLRSDLDNGNNSFQ |
| | (44-141) | | | YKLLGAGAGSTFIIDERTGDIYAIQKLDREERSLYILRAQVID |
| | ::ckCDH19 | | | IATGRAVEPESEEVIKVSDINDHEPQFLDGPYVATVPEMSPEG |
| | (142-776) | | | TSVTQVTATDGDDPSYGNNARLLYSLIQGQPYFSVEPKTGVIR |
| | | | | MTSQMDRETKDQYLVVIQAKDMVGQAGAFSATATVTINLSDVN |
| | | | | DNPPKFQQRLYYLNVSEEAPVGTTVGRLLAEDSDIGENAAMNY |
| | | | | FIEEDSSDVEGIITDRETQEGIIILKKRVDYESKRKHSVRVKA |
| | | | | VNRYIDDRFLKEGPFEDITIVQISVVDADEPPVFTLESYVMEI |
| | | | | AEGVVSGSLVGTVSARDLDNDDSSVRYSIVQGLHLKRLFSINE |
| | | | | HNGTIITTEPLDREKASWHNITVTATETRNPEKISEANVYIQV |
| | | | | LDVNDHAPEFSKYYETFVCENAVPGQLIQNISAVDKDDSAENH |
| | | | | RFYFSLAQATNSSHFTVKDNQDNTAGIFTAGSGFSRKEQFYFF |
| | | | | LPILILDNGSPPLTSTNTLTVTVCDCDTEVNTLYCRYGAFLYS |
| | | | | IGLSTEALVAVLACLLILLVFFLAIIGIRQQRKKTLFSEKVEE |
| | | | | FRENIVRYDDEGGGEEDTEAFDISALRTRAVLRTHKPRKKITT |
| | | | | EIHSLYRQSLQVGPDSAIFRQFISEKLEEANTDPSVPPYDSLQ |
| | | | | TYAFEGTGSLAGSLSSLGSNTSDVDQNYEYLVGWGPPFKQLAG |
| | | | | MYTSQRSTRD |
| 1453 | ckCDH19(1-43) | artificial | aa | MNCSTFLSLVLALVQLQLCSPTTQIFSAQKTDQSYTTIRRVKR |
| | ::FLAG:: | | | DYKDDDDKGWVWEPLFVTEEETSTMPMYVGQLKSDLDKEDGSL |
| | ckCDH19(44-141) | | | QYILTGEGADSIFFINEHGKIYVRQKLDREKKSFYILRAQVIN |
| | ::huCDH19 | | | RKTRHPIEPDSEFIIKVRDINDNEPKELDEPYEAIVPEMSPEG |
| | (142-249) | | | TLVIQVTASDADDPSSGNNARLLYSLLQGQPYFSVEPTTGVIR |
| | ::ckCDH19 | | | ISSKMDRELQDEYWVIIQAKDMIGQPGALSGTTSVLIKLSDVN |
| | (250-776) | | | DNPPKFQQRLYYLNVSEEAPVGTTVGRLLAEDSDIGENAAMNY |
| | | | | FIEEDSSDVEGIITDRETQEGIIILKKRVDYESKRKHSVRVKA |
| | | | | VNRYIDDRFLKEGPFEDITIVQISVVDADEPPVFTLESYVMEI |
| | | | | AEGVVSGSLVGTVSARDLDNDDSSVRYSIVQGLHLKRLFSINE |
| | | | | HNGTIITTEPLDREKASWHNITVTATETRNPEKISEANVYIQV |
| | | | | LDVNDHAPEFSKYYETFVCENAVPGQLIQNISAVDKDDSAENH |
| | | | | RFYFSLAQATNSSHFTVKDNQDNTAGIFTAGSGFSRKEQFYFF |
| | | | | LPILILDNGSPPLTSTNTLTVTVCDCDTEVNTLYCRYGAFLYS |
| | | | | IGLSTEALVAVLACLLILLVFFLAIIGIRQQRKKTLFSEKVEE |
| | | | | FRENIVRYDDEGGGEEDTEAFDISALRTRAVLRTHKPRKKITT |
| | | | | EIHSLYRQSLQVGPDSAIFRQFISEKLEEANTDPSVPPYDSLQ |
| | | | | TYAFEGTGSLAGSLSSLGSNTSDVDQNYEYLVGWGPPFKQLAG |
| | | | | MYTSQRSTRD |
| 1454 | ckCDH19(1-43) | artificial | aa | MNCSTFLSLVLALVQLQLCSPTTQIFSAQKTDQSYTTIRRVKR |
| | ::FLAG:: | | | DYKDDDDKGWVWEPLFVTEEETSTMPMYVGQLKSDLDKEDGSL |
| | ckCDH19(44-249) | | | QYILTGEGADSIFFINEHGKIYVRQKLDREKKSFYILRAQVIN |
| | ::huCDH19 | | | RKTRHPIEPDSEFIIKVRDINDHEPQFLDGPYVATVPEMSPEG |
| | (250-364) | | | TSVTQVTATDGDDPSYGNNARLLYSLIQGQPYFSVEPKTGVIR |
| | ::ckCDH19 | | | MTSQMDRETKDQYLVVIQAKDMVGQAGAFSATATVTINLSDVN |
| | (365-776) | | | DNKPIFKESLYRLTVSESAPTGTSIGTIMAYDNDIGENAEMDY |
| | | | | SIEEDDSQTEDIITNHETQEGIVILKKKVDFEHQNHYGIRAKV |
| | | | | KNHHVPEQLMKYHTEASTTFIKIQVEDVDEPPVFTLESYVMEI |
| | | | | AEGVVSGSLVGTVSARDLDNDDSSVRYSIVQGLHLKRLFSINE |
| | | | | HNGTIITTEPLDREKASWHNITVTATETRNPEKISEANVYIQV |
| | | | | LDVNDHAPEFSKYYETFVCENAVPGQLIQNISAVDKDDSAENH |
| | | | | RFYFSLAQATNSSHFTVKDNQDNTAGIFTAGSGFSRKEQFYFF |
| | | | | LPILILDNGSPPLTSTNTLTVTVCDCDTEVNTLYCRYGAFLYS |
| | | | | IGLSTEALVAVLACLLILLVFFLAIIGIRQQRKKTLFSEKVEE |
| | | | | FRENIVRYDDEGGGEEDTEAFDISALRTRAVLRTHKPRKKITT |
| | | | | EIHSLYRQSLQVGPDSAIFRQFISEKLEEANTDPSVPPYDSLQ |
| | | | | TYAFEGTGSLAGSLSSLGSNTSDVDQNYEYLVGWGPPFKQLAG |
| | | | | MYTSQRSTRD |
| 1455 | ckCDH19(1-43) | artificial | aa | MNCSTFLSLVLALVQLQLCSPTTQIFSAQKTDQSYTTIRRVKR |
| | ::FLAG:: | | | DYKDDDDKGWVWEPLFVTEEETSTMPMYVGQLKSDLDKEDGSL |
| | ckCDH19(44-364) | | | QYILTGEGADSIFFINEHGKIYVRQKLDREKKSFYILRAQVIN |
| | ::huCDH19 | | | RKTRHPIEPDSEFIIKVRDINDHEPQFLDGPYVATVPEMSPEG |
| | (365-463) | | | TSVTQVTATDGDDPSYGNNARLLYSLIQGQPYFSVEPKTGVIR |
| | ::ckCDH19 | | | MTSQMDRETKDQYLVVIQAKDMVGQAGAFSATATVTINLSDVN |
| | (469-776) | | | DNPPKFQQRLYYLNVSEEAPVGTTVGRLLAEDSDIGENAAMNY |
| | | | | FIEEDSSDVEGIITDRETQEGIIILKKRVDYESKRKHSVRVKA |
| | | | | VNRYIDDRFLKEGPFEDITIVQISVVDADEPPLFLLPYYVFEV |
| | | | | FEETPQGSFVGVVSATDPDNRKSPIRYSITRSKVFNINDNGTI |
| | | | | TTSNSLDREISAWYNLSITATEKYNIEQISSIPLYVQVLNIND |
| | | | | HAPEFSKYYETFVCENAVPGQLIQNISAVDKDDSAENHRFYFS |
| | | | | LAQATNSSHFTVKDNQDNTAGIFTAGSGFSRKEQFYFFLPILI |
| | | | | LDNGSPPLTSTNTLTVTVCDCDTEVNTLYCRYGAFLYSIGLST |
| | | | | EALVAVLACLLILLVFFLAIIGIRQQRKKTLFSEKVEEFRENI |
| | | | | VRYDDEGGGEEDTEAFDISALRTRAVLRTHKPRKKITTEIHSL |
| | | | | YRQSLQVGPDSAIFRQFISEKLEEANTDPSVPPYDSLQTYAFE |
| | | | | GTGSLAGSLSSLGSNTSDVDQNYEYLVGWGPPFKQLAGMYTSQ |
| | | | | RSTRD |
| 1456 | (1-43) | artificial | aa | MNCSTFLSLVLALVQLQLCSPTTQIFSAQKTDQSYTTIRRVKR |
| | ::FLAG:: | | | DYKDDDDKGWVWEPLFVTEEETSTMPMYVGQLKSDLDKEDGSL |
| | ckCDH19(44-468) | | | QYILTGEGADSIFFINEHGKIYVRQKLDREKKSFYILRAQVIN |
| | ::huCDH19 | | | RKTRHPIEPDSEFIIKVRDINDHEPQFLDGPYVATVPEMSPEG |
| | (464-772) | | | TSVTQVTATDGDDPSYGNNARLLYSLIQGQPYFSVEPKTGVIR |
| | | | | MTSQMDRETKDQYLVVIQAKDMVGQAGAFSATATVTINLSDVN |
| | | | | DNPPKFQQRLYYLNVSEEAPVGTTVGRLLAEDSDIGENAAMNY |
| | | | | FIEEDSSDVEGIITDRETQEGIIILKKRVDYESKRKHSVRVKA |
| | | | | VNRYIDDRFLKEGPFEDITIVQISVVDADEPPVFTLESYVMEI |
| | | | | AEGVVSGSLVGTVSARDLDNDDSSVRYSIVQGLHLKRLFSINE |
| | | | | HNGTIITTEPLDREKASWHNITVTATETRNPEKISEANVYIQV |
| | | | | LDVNDHAPEFSQYYETYVCENAGSGQVIQTISAVDRDESIEEH |
| | | | | HEYFNLSVEDTNNSSETIIDNQDNTAVILTNRTGENLQEEPVF |
| | | | | YISILIADNGIPSLTSTNTLTIHVCDCGDSGSTQTCQYQELVL |
| | | | | SMGFKTEVITATLICIMIIFGFIFLTLGLKQRRKQILFPEKSE |
| | | | | DFRENIFQYDDEGGGEEDTEAFDIAELRSSTIMRERKTRKTTS |
| | | | | AEIRSLYRQSLQVGPDSAIFRKFILEKLEEANTDPCAPPFDSL |
| | | | | QTYAFEGTGSLAGSLSSLESAVSDQDESYDYLNELGPRFKRLA |
| | | | | CMFGSAVQSNN |
| 1457 | rhCDH19(1-43) | artificial | aa | MNCYLLLPFMLGIPLLWPCLGATENSQTKKVQQPVGSHLRVKR |
| | ::FLAG:: | | | DYKDDDDKGWVWNQFFVPEEMNTTSHHVGRLRSDLDNGNNSFQ |
| | rhCDH19(44-772) | | | YKLLGAGAGSTFIIDERTGDIYAIEKLDREERSLYILRAQVID |
| | | | | ITTGRAVEPESEFVIKVSDINDNEPKELDEPYEAIVPEMSPEG |
| | | | | TLVIQVTASDADDPSSGNNARLLYSLLQGQPYFSVEPTTGVIR |
| | | | | ISSKMDRELQDEYWVIIQAKDMIGQPGALSGTTSVLIKLSDVN |
| | | | | DNKPIFKESLYRLTVSESAPTGTSIGTIMAYDNDIGENAEMDY |
| | | | | SIEEDDSQTEDIITNHETQEGIVILKKKVNFEHQNHYGIRAKV |
| | | | | KNHHVDEQLMKYHTEASTTFIKIQVEDVDEPPLELLPYYIFEI |
| | | | | FEETPQGSFVGVVSATDPDNRKSPIRYSITRSKVFNIDDNGTI |
| | | | | TTTNSLDREISAWYNLSITATEKYNIEQISSIPVYVQVLNIND |
| | | | | HAPEFSQYYESYVCENAGSGQVIQTISAVDRDESIEEHHEYEN |
| | | | | LSVEDTNSSSETIIDNQDNTAVILTNRTGFNLQEEPIFYISIL |
| | | | | IADNGIPSLTSTNTLTIHVCDCDDSGSTQTCQYQELMLSMGFK |
| | | | | TEVIIAILICIMVIEGFIFLTLGLKQRRKQILFPEKSEDFREN |
| | | | | IFRYDDEGGGEEDTEAFDVAALRSSTIMRERKTRKTTSAEIRS |
| | | | | LYRQSLQVGPDSAIFRKFILEKLEEADTDPCAPPFDSLQTYAF |
| | | | | EGTGSLAGSLSSLESAVSDQDESYDYLNELGPRFKRLACMFGS |
| | | | | AVQSNN |
| 1458 | caCDH19(1-42) | artificial | aa | QFFVPEEMNKTDYHIGQLRSDLDNGNNSFQYKLLGAGAGSIFV |
| | ::FLAG:: | | | IDERTGDIYAIQKLDREERSLYTLRAQVIDSTTGRAVEPESEF |
| | caCDH19(43-770) | | | VIRVSDINDNEPKELDEPYEAIVPEMSPEGTLVIQVTATDADD |
| | | | | PASGNNARLLYSLLQGQPYFSIEPTTGVIRISSKMDRELQDEY |
| | | | | WVIIQAKDMIGLPGALSGTTSVLIKLSDVNDNKPIFKERLYRL |
| | | | | TVSESAPTGTSIGRIMAYDNDIGENAEMDYSIEDDSQTFDIIT |
| | | | | NNETQEGIVILKKKVDFEHQNHYLIRANVKNRHVAEHLMEYHV |
| | | | | EASTTEVRVQVEDEDEPPVELLPYYLFEILEESPHGSFVGMVS |
| | | | | ATDPDQRKSPIRYSITRSKVFSIDDNGTIITTNPLDREISAWY |
| | | | | NLSITATEKYNVQQISAVPVYVQVLNINDHAPEFSEYYDSYVC |
| | | | | ENAGSGQVIQTISAVDRDESVEDHHEYFNLSVEDTKNSSFIII |
| | | | | DNEDNTAVILTNRTGFSLQEEPVFYISVLIADNGIPSLTSTNT |
| | | | | LTIHICDCDDYGSTQTCRDKDLLLSMGFRTEVILAILISIMII |
| | | | | FGFIFLILGLKQRRKPTLFPEKGEDFRENIFRYDDEGGGEEDT |
| | | | | EAFDIVQLRSSTIMRERKTRKTAAAEIRSLYRQSLQVGPDSAI |
| | | | | FRKFILEKLEEANTDPCAPPFDSLQTYAFEGTGSLAGSLSSLG |
| | | | | SAVSDQDENYDYLNELGPRFKRLACMFGSAMQSNN |
| 1459 | rhCDH19(1-43) | artificial | aa | MNCYLLLPFMLGIPLLWPCLGATENSQTKKVQQPVGSHLRVKR |
| | :FLAG:: | | | DYKDDDDKGWVWNQFFVPEEMNTTSHHVGRLRSDLDNGNNSFQ |
| | rhCDH19(44-141) | | | YKLLGAGAGSTFIIDERTGDIYAIEKLDREERSLYILRAQVID |
| | ::caCDH19 | | | ITTGRAVEPESEFVIKVSDINDNEPKFLDEPYEAIVPEMSPEG |
| | (141-770) | | | TLVIQVTATDADDPASGNNARLLYSLLQGQPYFSIEPTTGVIR |
| | | | | ISSKMDRELQDEYWVIIQAKDMIGLPGALSGTTSVLIKLSDVN |
| | | | | DNKPIFKERLYRLTVSESAPTGTSIGRIMAYDNDIGENAEMDY |
| | | | | SIEDDSQTFDIITNNETQEGIVILKKKVDFEHQNHYLIRANVK |
| | | | | NRHVAEHLMEYHVEASTTEVRVQVEDEDEPPVELLPYYLFEIL |
| | | | | EESPHGSFVGMVSATDPDQRKSPIRYSITRSKVFSIDDNGTII |
| | | | | TTNPLDREISAWYNLSITATEKYNVQQISAVPVYVQVLNINDH |
| | | | | APEFSEYYDSYVCENAGSGQVIQTISAVDRDESVEDHHEYFNL |
| | | | | SVEDTKNSSFIIIDNEDNTAVILTNRTGFSLQEEPVFYISVLI |
| | | | | ADNGIPSLTSTNTLTIHICDCDDYGSTQTCRDKDLLLSMGERT |
| | | | | EVILAILISIMIIFGFIFLILGLKQRRKPTLFPEKGEDFRENI |
| | | | | FRYDDEGGGEEDTEAFDIVQLRSSTIMRERKTRKTAAAEIRSL |
| | | | | YRQSLQVGPDSAIFRKFILEKLEEANTDPCAPPFDSLQTYAFE |
| | | | | GTGSLAGSLSSLGSAVSDQDENYDYLNELGPRFKRLACMFGSA |
| | | | | MQSNN |
| 1460 | rhCDH19(1-43) | artificial | aa | MNCYLLLPFMLGIPLLWPCLGATENSQTKKVQQPVGSHLRVKR |
| | ::FLAG:: | | | DYKDDDDKGWVWNQFFVPEEMNTTSHHVGRLRSDLDNGNNSFQ |
| | rhCDH19(44-65) | | | YKLLGAGAGSIFVIDERTGDIYAIQKLDREERSLYTLRAQVID |
| | ::caCDH19 | | | STTGRAVEPESEEVIRVSDINDNEPKELDEPYEAIVPEMSPEG |
| | (65-770) | | | TLVIQVTATDADDPASGNNARLLYSLLQGQPYFSIEPTTGVIR |
| | | | | ISSKMDRELQDEYWVIIQAKDMIGLPGALSGTTSVLIKLSDVN |
| | | | | DNKPIFKERLYRLTVSESAPTGTSIGRIMAYDNDIGENAEMDY |
| | | | | SIEDDSQTFDIITNNETQEGIVILKKKVDFEHQNHYLIRANVK |
| | | | | NRHVAEHLMEYHVEASTTEVRVQVEDEDEPPVELLPYYLFEIL |
| | | | | EESPHGSFVGMVSATDPDQRKSPIRYSITRSKVFSIDDNGTII |
| | | | | TTNPLDREISAWYNLSITATEKYNVQQISAVPVYVQVLNINDH |
| | | | | APEFSEYYDSYVCENAGSGQVIQTISAVDRDESVEDHHEYFNL |
| | | | | SVEDTKNSSFIIIDNEDNTAVILTNRTGFSLQEEPVFYISVLI |
| | | | | ADNGIPSLTSTNTLTIHICDCDDYGSTQTCRDKDLLLSMGERT |
| | | | | EVILAILISIMIIFGFIFLILGLKQRRKPTLFPEKGEDFRENI |
| | | | | FRYDDEGGGEEDTEAFDIVQLRSSTIMRERKTRKTAAAEIRSL |
| | | | | YRQSLQVGPDSAIFRKFILEKLEEANTDPCAPPFDSLQTYAFE |
| | | | | GTGSLAGSLSSLGSAVSDQDENYDYLNELGPRFKRLACMFGSA |
| | | | | MQSNN |
| 1461 | caCDH19(1-43) | artificial | aa | MNYCFLLPLMLGIPLIWPCFTASESSKTEVKHQAGSHLRVKRD |
| | ::FLAG:: | | | YKDDDDKGWMWNQFFVPEEMNKTDYHIGQLRSDLDNGNNSFQY |
| | DcaCH19(44-87) | | | KLLGAGAGSTFIIDERTGDIYAIEKLDREERSLYILRAQVIDS |
| | ::rhCDH19 | | | TTGRAVEPESEEVIRVSDINDNEPKELDEPYEAIVPEMSPEGT |
| | (89-114) | | | LVIQVTATDADDPASGNNARLLYSLLQGQPYFSIEPTTGVIRI |
| | ::caCDH19 | | | SSKMDRELQDEYWVIIQAKDMIGLPGALSGTTSVLIKLSDVND |
| | (115-770) | | | NKPIFKERLYRLTVSESAPTGTSIGRIMAYDNDIGENAEMDYS |
| | | | | IEDDSQTFDIITNNETQEGIVILKKKVDFEHQNHYLIRANVKN |
| | | | | RHVAEHLMEYHVEASTTEVRVQVEDEDEPPVELLPYYLFEILE |
| | | | | ESPHGSFVGMVSATDPDQRKSPIRYSITRSKVFSIDDNGTIIT |
| | | | | TNPLDREISAWYNLSITATEKYNVQQISAVPVYVQVLNINDHA |
| | | | | PEFSEYYDSYVCENAGSGQVIQTISAVDRDESVEDHHEYFNLS |
| | | | | VEDTKNSSFIIIDNEDNTAVILTNRTGFSLQEEPVFYISVLIA |
| | | | | DNGIPSLTSTNTLTIHICDCDDYGSTQTCRDKDLLLSMGERTE |
| | | | | VILAILISIMIIFGFIFLILGLKQRRKPTLFPEKGEDFRENIF |
| | | | | RYDDEGGGEEDTEAFDIVQLRSSTIMRERKTRKTAAAEIRSLY |
| | | | | RQSLQVGPDSAIFRKFILEKLEEANTDPCAPPFDSLQTYAFEG |
| | | | | TGSLAGSLSSLGSAVSDQDENYDYLNELGPRFKRLACMFGSAM |
| | | | | QSNN |
| 1462 | caCDH19(1-43) | artificial | aa | MNYCFLLPLMLGIPLIWPCFTASESSKTEVKHQAGSHLRVKRD |
| | ::FLAG:: | | | YKDDDDKGWMWNQFFVPEEMNKTDYHIGQLRSDLDNGNNSFQY |
| | caCDH19(44-120) | | | KLLGAGAGSIFVIDERTGDIYAIQKLDREERSLYTLRAQVIDI |
| | ::rhCDH19 | | | TTGRAVEPESEEVIKVSDINDNEPKELDEPYEAIVPEMSPEGT |
| | (122-137) | | | LVIQVTATDADDPASGNNARLLYSLLQGQPYFSIEPTTGVIRI |
| | ::caCDH19 | | | SSKMDRELQDEYWVIIQAKDMIGLPGALSGTTSVLIKLSDVND |
| | (137-770) | | | NKPIFKERLYRLTVSESAPTGTSIGRIMAYDNDIGENAEMDYS |
| | | | | IEDDSQTFDIITNNETQEGIVILKKKVDFEHQNHYLIRANVKN |
| | | | | RHVAEHLMEYHVEASTTEVRVQVEDEDEPPVELLPYYLFEILE |
| | | | | ESPHGSFVGMVSATDPDQRKSPIRYSITRSKVFSIDDNGTIIT |
| | | | | TNPLDREISAWYNLSITATEKYNVQQISAVPVYVQVLNINDHA |
| | | | | PEFSEYYDSYVCENAGSGQVIQTISAVDRDESVEDHHEYFNLS |
| | | | | VEDTKNSSFIIIDNEDNTAVILTNRTGFSLQEEPVFYISVLIA |
| | | | | DNGIPSLTSTNTLTIHICDCDDYGSTQTCRDKDLLLSMGERTE |
| | | | | VILAILISIMIIFGFIFLILGLKQRRKPTLFPEKGEDFRENIF |
| | | | | RYDDEGGGEEDTEAFDIVQLRSSTIMRERKTRKTAAAEIRSLY |
| | | | | RQSLQVGPDSAIFRKFILEKLEEANTDPCAPPFDSLQTYAFEG |
| | | | | TGSLAGSLSSLGSAVSDQDENYDYLNELGPRFKRLACMFGSAM |
| | | | | QSNN |
| 1463 | rhCDH19(1-43) | artificial | aa | MNCYLLLPFMLGIPLLWPCLGATENSQTKKVQQPVGSHLRVKR |
| | ::FLAG:: | | | DYKDDDDKGWVWNQFFVPEEMNTTSHHVGRLRSDLDNGNNSFQ |
| | rhCDH19(44-141) | | | YKLLGAGAGSTFIIDERTGDIYAIEKLDREERSLYILRAQVID |
| | ::raCDH19 | | | ITTGRAVEPESEFVIKVSDINDNEPRFLDEPYEAIVPEMSPEG |
| | (140-247) | | | TFVIKVTANDADDPTSGYHARILYNLEQGQPYFSVEPTTGVIR |
| | ::rhCDH19 | | | ISSKMDRELQDTYCVIIQAKDMLGQPGALSGTTTISIKLSDIN |
| | (250-772) | | | DNKPIFKESLYRLTVSESAPTGTSIGTIMAYDNDIGENAEMDY |
| | | | | SIEEDDSQTFDIITNHETQEGIVILKKKVNFEHQNHYGIRAKV |
| | | | | KNHHVDEQLMKYHTEASTTFIKIQVEDVDEPPLFLLPYYIFEI |
| | | | | FEETPQGSFVGVVSATDPDNRKSPIRYSITRSKVFNIDDNGTI |
| | | | | TTTNSLDREISAWYNLSITATEKYNIEQISSIPVYVQVLNIND |
| | | | | HAPEFSQYYESYVCENAGSGQVIQTISAVDRDESIEEHHEYEN |
| | | | | LSVEDTNSSSETIIDNQDNTAVILTNRTGFNLQEEPIFYISIL |
| | | | | IADNGIPSLTSTNTLTIHVCDCDDSGSTQTCQYQELMLSMGFK |
| | | | | TEVIIAILICIMVIEGFIFLTLGLKQRRKQILFPEKSEDFREN |
| | | | | IFRYDDEGGGEEDTEAFDVAALRSSTIMRERKTRKTTSAEIRS |
| | | | | LYRQSLQVGPDSAIFRKFILEKLEEADTDPCAPPFDSLQTYAF |
| | | | | EGTGSLAGSLSSLESAVSDQDESYDYLNELGPRFKRLACMFGS |
| | | | | AVQSNN |
| 1464 | raCDH19(1-43) | artificial | aa | MNHYFLKYWILMVPLIWPCLKVAETLKIEKAQRAVPSLGRAKR |
| | ::FLAG:: | | | DYKDDDDKGWVWKQFVVPEEMDTIQHVGRLRSDLDNGNNSFQY |
| | raCDH19(44-770) | | | KLLGTGDGSFSIDEKTGDIFAMQKLDREKQSLYILRAQVIDTT |
| | | | | IGKAVEPESEEVIRVSDVNDNEPRELDEPYEAIVPEMSPEGTF |
| | | | | VIKVTANDADDPTSGYHARILYNLEQGQPYFSVEPTTGVIRIS |
| | | | | SKMDRELQDTYCVIIQAKDMLGQPGALSGTTTISIKLSDINDN |
| | | | | KPIFKESFYRFTISESAPSGTTIGKIMAYDDDIGENAEMDYSI |
| | | | | EDDESQIFDIVIDNETQEGIVILKKKVDFEHQNHYGIRVKVKN |
| | | | | CHVDEELAPAHVNASTTYIKVQVEDEDEPPTFLLPYYIFEIPE |
| | | | | GKPYGTMVGTVSAVDPDRRQSPMRYSLIGSKMFDINGNGTIVT |
| | | | | TNLLDREVSAWYNLSVTATETYNVQQISSAHVYVQVLNINDHA |
| | | | | PEFSQLYETYVCENAESGEIIQTISAIDRDESIEDHHEYENHS |
| | | | | VEDTNNSSFILTDNQDNTAVILSNRAGESLKEETVEYMIILIA |
| | | | | DNGIPPLTSTNTLTIQVCDCGDSRSTETCTSKELLFIMGFKAE |
| | | | | AIIAIVICVMVIEGFIFLILALKQRRKETLFPEKTEDFRENIF |
| | | | | CYDDEGGGEEDSEAFDIIELRQSTVMRERKPRKSRSAEIRSLY |
| | | | | RQSLQVGPDSAIFRKFILEKLEEANTDSSAPPFDSLQTFAYEG |
| | | | | TGSSAGSLSSLGSSVTDQEDDFDYLNDLGPCFKRLANMFGSAV |
| | | | | QPDN |
| 1465 | (1-43) | artificial | aa | MNYCFLKHWILMIPLLWPCLKVSETLKAEKARRTVPSTWRAKR |
| | ::FLAG:: | | | DYKDDDDKAWVWRPFVVLEEMDDIQCVGKLRSDLDNGNNSFQY |
| | muCDH19(44-323) | | | KLLGIGAGSFSINERTGEICAIQKLDREEKSLYILRAQVIDTT |
| | ::raCDH19 | | | IGKAVETESEFVIRVLDINDNEPRELDEPYEAIVPEMSPEGTF |
| | (324-327) | | | VIKVTANDADDPSTGYHARILYNLERGQPYFSVEPTTGVIRIS |
| | ::muCDH19 | | | SKMDRELQDTYCVIIQAKDMLGQPGALSGTTTVSIKLSDINDN |
| | (328-770) | | | KPIFKESFYRFTISESAPIGTSIGKIMAYDDDIGENAEMEYSI |
| | | | | EDDDSKIFDIIIDNDTQEGIVILKKKVDFEHQNHYGIRAKVKN |
| | | | | CHVDEELAPAHVNASTTYIKVQVEDEDEPPVFLLPYYILEIPE |
| | | | | GKPYGTIVGTVSATDPDRRQSPMRYYLTGSKMFDINDNGTIIT |
| | | | | TNMLDREVSAWYNLTVTATETYNVQQISSAHVYVQVFNINDNA |
| | | | | PEFSQFYETYVCENAESGEIVQIISAIDRDESIEDHHEYENHS |
| | | | | LEDTNNSSFMLTDNQDNTAVILSNRTGENLKEEPVEYMIILIA |
| | | | | DNGIPSLTSTNTLTIQVCDCGDSRNTETCANKGLLFIMGFRTE |
| | | | | AIIAIMICVMVIFGEFFLILALKQRRKETLFPEKTEDFRENIF |
| | | | | CYDDEGGGEEDSEAFDIVELRQSTVMRERKPQRSKSAEIRSLY |
| | | | | RQSLQVGPDSAIFRKFILEKLEEANTDPCAPPFDSLQTFAYEG |
| | | | | TGSSAGSLSSLASRDTDQEDDFDYLNDLGPRFKRLASMFGSAV |
| | | | | QPNN |
| 1466 | muCDH19(1-43) | artificial | aa | MNYCFLKHWILMIPLLWPCLKVSETLKAEKARRTVPSTWRAKR |
| | ::FLAG:: | | | DYKDDDDKAWVWRPFVVLEEMDDIQCVGKLRSDLDNGNNSFQY |
| | muCDH19(44-770) | | | KLLGIGAGSFSINERTGEICAIQKLDREEKSLYILRAQVIDTT |
| | ::raCDH19 | | | IGKAVETESEFVIRVLDINDNEPRELDEPYEAIVPEMSPEGTF |
| | (290, 299, 308) | | | VIKVTANDADDPSTGYHARILYNLERGQPYFSVEPTTGVIRIS |
| | | | | SKMDRELQDTYCVIIQAKDMLGQPGALSGTTTVSIKLSDINDN |
| | | | | KPIFKESFYRFTISESAPIGTSIGKIMAYDDDIGENAEMEYSI |
| | | | | EDDDSKIFDIIIDNDTQEGIVILKKKVDFEQQSYYGIRAKVKN |
| | | | | CHVDEELAPAHVNASTTYIKVQVEDEDEPPVFLLPYYILEIPE |
| | | | | GKPYGTIVGTVSATDPDRRQSPMRYYLTGSKMFDINDNGTIIT |
| | | | | TNMLDREVSAWYNLTVTATETYNVQQISSAHVYVQVFNINDNA |
| | | | | PEFSQFYETYVCENAESGEIVQIISAIDRDESIEDHHEYENHS |
| | | | | LEDTNNSSFMLTDNQDNTAVILSNRTGENLKEEPVEYMIILIA |
| | | | | DNGIPSLTSTNTLTIQVCDCGDSRNTETCANKGLLFIMGFRTE |
| | | | | AIIAIMICVMVIFGEFFLILALKQRRKETLFPEKTEDFRENIF |
| | | | | CYDDEGGGEEDSEAFDIVELRQSTVMRERKPQRSKSAEIRSLY |
| | | | | RQSLQVGPDSAIFRKFILEKLEEANTDPCAPPFDSLQTFAYEG |
| | | | | TGSSAGSLSSLASRDTDQEDDFDYLNDLGPRFKRLASMFGSAV |
| | | | | QPNN |
| 1467 | muCDH19(1-43) | artificial | aa | MNYCFLKHWILMIPLLWPCLKVSETLKAEKARRTVPSTWRAKR |
| | ::FLAG:: | | | DYKDDDDKAWVWRPFVVLEEMDDIQCVGKLRSDLDNGNNSFQY |
| | muCDH19(44-770) | | | KLLGIGAGSFSINERTGEICAIQKLDREEKSLYILRAQVIDTT |
| | ::huCDH19 | | | IGKAVETESEFVIRVLDINDNEPRELDEPYEAIVPEMSPEGTF |
| | (271) | | | VIKVTANDADDPSTGYHARILYNLERGQPYFSVEPTTGVIRIS |
| | | | | SKMDRELQDTYCVIIQAKDMLGQPGALSGTTTVSIKLSDINDN |
| | | | | KPIFKESFYRFTISESAPTGTSIGKIMAYDDDIGENAEMEYSI |
| | | | | EDDDSKIFDIIIDNDTQEGIVILKKKVDFEQQSYYGIRAKVKN |
| | | | | CHVDEELAPAHVNASTTYIKVQVEDEDEPPVFLLPYYILEIPE |
| | | | | GKPYGTIVGTVSATDPDRRQSPMRYYLTGSKMFDINDNGTIIT |
| | | | | TNMLDREVSAWYNLTVTATETYNVQQISSAHVYVQVFNINDNA |
| | | | | PEFSQFYETYVCENAESGEIVQIISAIDRDESIEDHHFYFNHS |
| | | | | LEDTNNSSFMLTDNQDNTAVILSNRTGFNLKEEPVFYMIILIA |
| | | | | DNGIPSLTSTNTLTIQVCDCGDSRNTETCANKGLLFIMGFRTE |
| | | | | AIIAIMICVMVIFGFFFLILALKQRRKETLFPEKTEDFRENIF |
| | | | | CYDDEGGGEEDSEAFDIVELRQSTVMRERKPQRSKSAEIRSLY |
| | | | | RQSLQVGPDSAIFRKFILEKLEEANTDPCAPPFDSLQTFAYEG |
| | | | | TGSSAGSLSSLASRDTDQEDDFDYLNDLGPRFKRLASMFGSAV |
| | | | | QPNN |

1. An isolated multispecific antibody construct comprising a first human binding domain capable of binding to human CDH19 on the surface of a target cell and a second domain capable of binding to human CD3 on the surface of a T cell.

2. The antibody construct according to claim 1, wherein the first binding domain comprises a VH region comprising CDR-H1, CDR-H2 and CDR-H3 and a VL region comprising CDR-L1, CDR-L2 and CDR-L3 selected from the group consisting of:
(a) CDR-H1 as depicted in SEQ ID NO: 52, CDR-H2 as depicted in SEQ ID NO: 53, CDR-H3 as depicted in SEQ ID NO: 54, CDR-L1 as depicted in SEQ ID NO: 220, CDR-L2 as depicted in SEQ ID NO: 221 and CDR-L3 as depicted in SEQ ID NO: 222,
CDR-H1 as depicted in SEQ ID NO: 82, CDR-H2 as depicted in SEQ ID NO: 83, CDR-H3 as depicted in SEQ ID NO: 84, CDR-L1 as depicted in SEQ ID NO: 250, CDR-L2 as depicted in SEQ ID NO: 251 and CDR-L3 as depicted in SEQ ID NO: 252,
CDR-H1 as depicted in SEQ ID NO: 82, CDR-H2 as depicted in SEQ ID NO: 83, CDR-H3 as depicted in SEQ ID NO: 84, CDR-L1 as depicted in SEQ ID NO: 250, CDR-L2 as depicted in SEQ ID NO: 251 and CDR-L3 as depicted in SEQ ID NO: 927,
CDR-H1 as depicted in SEQ ID NO: 82, CDR-H2 as depicted in SEQ ID NO: 83, CDR-H3 as depicted in SEQ ID NO: 909, CDR-L1 as depicted in SEQ ID NO: 250, CDR-L2 as depicted in SEQ ID NO: 251 and CDR-L3 as depicted in SEQ ID NO: 927,
CDR-H1 as depicted in SEQ ID NO: 52, CDR-H2 as depicted in SEQ ID NO: 53, CDR-H3 as depicted in SEQ ID NO: 54, CDR-L1 as depicted in SEQ ID NO: 220, CDR-L2 as depicted in SEQ ID NO: 221 and CDR-L3 as depicted in SEQ ID NO: 926,
CDR-H1 as depicted in SEQ ID NO: 52, CDR-H2 as depicted in SEQ ID NO: 53, CDR-H3 as depicted in SEQ ID NO: 904, CDR-L1 as depicted in SEQ ID NO: 220, CDR-L2 as depicted in SEQ ID NO: 221 and CDR-L3 as depicted in SEQ ID NO: 926,
CDR-H1 as depicted in SEQ ID NO: 1126, CDR-H2 as depicted in SEQ ID NO: 1127, CDR-H3 as depicted in SEQ ID NO: 1128, CDR-L1 as depicted in SEQ ID NO: 1129, CDR-L2 as depicted in SEQ ID NO: 1130 and CDR-L3 as depicted in SEQ ID NO: 1131,
CDR-H1 as depicted in SEQ ID NO: 1165, CDR-H2 as depicted in SEQ ID NO: 1166, CDR-H3 as depicted in SEQ ID NO: 1167, CDR-L1 as depicted in SEQ ID NO: 1168, CDR-L2 as depicted in SEQ ID NO: 1169 and CDR-L3 as depicted in SEQ ID NO: 1170,
CDR-H1 as depicted in SEQ ID NO: 1334, CDR-H2 as depicted in SEQ ID NO: 1335, CDR-H3 as depicted in SEQ ID NO: 1336, CDR-L1 as depicted in SEQ ID NO: 1337, CDR-L2 as depicted in SEQ ID NO: 1338 and CDR-L3 as depicted in SEQ ID NO: 1339,
CDR-H1 as depicted in SEQ ID NO: 1347, CDR-H2 as depicted in SEQ ID NO: 1348, CDR-H3 as depicted in SEQ ID NO: 1349, CDR-L1 as depicted in SEQ ID NO: 1350, CDR-L2 as depicted in SEQ ID NO: 1351 and CDR-L3 as depicted in SEQ ID NO: 1352, and
CDR-H1 as depicted in SEQ ID NO: 1360 CDR-H2 as depicted in SEQ ID NO: 1361, CDR-H3 as depicted in SEQ ID NO: 1362, CDR-L1 as depicted in SEQ ID NO: 1363, CDR-L2 as depicted in SEQ ID NO: 1364 and CDR-L3 as depicted in SEQ ID NO: 1365,
CDR-H1 as depicted in SEQ ID NO: 1425 CDR-H2 as depicted in SEQ ID NO: 1426, CDR-H3 as depicted in SEQ ID NO: 1427, CDR-L1 as depicted in SEQ ID NO: 1428, CDR-L2 as depicted in SEQ ID NO: 1429 and CDR-L3 as depicted in SEQ ID NO: 1430,
CDR-H1 as depicted in SEQ ID NO: 1438 CDR-H2 as depicted in SEQ ID NO: 1439, CDR-H3 as depicted in SEQ ID NO: 1440, CDR-L1 as depicted in SEQ ID NO: 1441, CDR-L2 as depicted in SEQ ID NO: 1442 and CDR-L3 as depicted in SEQ ID NO: 1443;
(b) CDR-H1 as depicted in SEQ ID NO: 124, CDR-H2 as depicted in SEQ ID NO: 125, CDR-H3 as depicted in SEQ ID NO: 126, CDR-L1 as depicted in SEQ ID NO: 292, CDR-L2 as depicted in SEQ ID NO: 293 and CDR-L3 as depicted in SEQ ID NO: 294,
CDR-H1 as depicted in SEQ ID NO: 130, CDR-H2 as depicted in SEQ ID NO: 131, CDR-H3 as depicted in SEQ ID NO: 132, CDR-L1 as depicted in SEQ ID NO: 298, CDR-L2 as depicted in SEQ ID NO: 299 and CDR-L3 as depicted in SEQ ID NO: 300,
CDR-H1 as depicted in SEQ ID NO: 136, CDR-H2 as depicted in SEQ ID NO: 137, CDR-H3 as depicted in SEQ ID NO: 138, CDR-L1 as depicted in SEQ ID NO: 304, CDR-L2 as depicted in SEQ ID NO: 305 and CDR-L3 as depicted in SEQ ID NO: 306,
CDR-H1 as depicted in SEQ ID NO: 142, CDR-H2 as depicted in SEQ ID NO: 143, CDR-H3 as depicted in SEQ ID NO: 144, CDR-L1 as depicted in SEQ ID NO: 310, CDR-L2 as depicted in SEQ ID NO: 311 and CDR-L3 as depicted in SEQ ID NO: 312,
CDR-H1 as depicted in SEQ ID NO: 148, CDR-H2 as depicted in SEQ ID NO: 149, CDR-H3 as depicted in SEQ ID NO: 150, CDR-L1 as depicted in SEQ ID NO: 316, CDR-L2 as depicted in SEQ ID NO: 317 and CDR-L3 as depicted in SEQ ID NO: 318,
CDR-H1 as depicted in SEQ ID NO: 166, CDR-H2 as depicted in SEQ ID NO: 167, CDR-H3 as depicted in SEQ ID NO: 168, CDR-L1 as depicted in SEQ ID NO: 334, CDR-L2 as depicted in SEQ ID NO: 335 and CDR-L3 as depicted in SEQ ID NO: 336,
CDR-H1 as depicted in SEQ ID NO: 124, CDR-H2 as depicted in SEQ ID NO: 125, CDR-H3 as depicted in SEQ ID NO: 915, CDR-L1 as depicted in SEQ ID NO: 292, CDR-L2 as depicted in SEQ ID NO: 293 and CDR-L3 as depicted in SEQ ID NO: 294,
CDR-H1 as depicted in SEQ ID NO: 124, CDR-H2 as depicted in SEQ ID NO: 125, CDR-H3 as depicted in SEQ ID NO: 915, CDR-L1 as depicted in SEQ ID NO: 292, CDR-L2 as depicted in SEQ ID NO: 293 and CDR-L3 as depicted in SEQ ID NO: 928,
CDR-H1 as depicted in SEQ ID NO: 124, CDR-H2 as depicted in SEQ ID NO: 125, CDR-H3 as depicted in SEQ ID NO: 915, CDR-L1 as depicted in SEQ ID NO: 292, CDR-L2 as depicted in SEQ ID NO: 293 and CDR-L3 as depicted in SEQ ID NO: 929,
CDR-H1 as depicted in SEQ ID NO: 166, CDR-H2 as depicted in SEQ ID NO: 167, CDR-H3 as depicted in SEQ ID NO: 168, CDR-L1 as depicted in SEQ ID NO: 334, CDR-L2 as depicted in SEQ ID NO: 335 and CDR-L3 as depicted in SEQ ID NO: 336,
CDR-H1 as depicted in SEQ ID NO: 166, CDR-H2 as depicted in SEQ ID NO: 167, CDR-H3 as depicted in SEQ ID NO: 168, CDR-L1 as depicted in SEQ ID NO: 334, CDR-L2 as depicted in SEQ ID NO: 335 and CDR-L3 as depicted in SEQ ID NO: 942,
CDR-H1 as depicted in SEQ ID NO: 166, CDR-H2 as depicted in SEQ ID NO: 167, CDR-H3 as depicted in SEQ ID NO: 168, CDR-L1 as depicted in SEQ ID NO: 334, CDR-L2 as depicted in SEQ ID NO: 335 and CDR-L3 as depicted in SEQ ID NO: 943,
CDR-H1 as depicted in SEQ ID NO: 148, CDR-H2 as depicted in SEQ ID NO: 149, CDR-H3 as depicted in SEQ ID NO: 150, CDR-L1 as depicted in SEQ ID NO: 316, CDR-L2 as depicted in SEQ ID NO: 317 and CDR-L3 as depicted in SEQ ID NO: 318,
CDR-H1 as depicted in SEQ ID NO: 148, CDR-H2 as depicted in SEQ ID NO: 149, CDR-H3 as depicted in SEQ ID NO: 150, CDR-L1 as depicted in SEQ ID NO: 316, CDR-L2 as depicted in SEQ ID NO: 317 and CDR-L3 as depicted in SEQ ID NO: 937,
CDR-H1 as depicted in SEQ ID NO: 148, CDR-H2 as depicted in SEQ ID NO: 149, CDR-H3 as depicted in SEQ ID NO: 150, CDR-L1 as depicted in SEQ ID NO: 316, CDR-L2 as depicted in SEQ ID NO: 317 and CDR-L3 as depicted in SEQ ID NO: 938,
CDR-H1 as depicted in SEQ ID NO: 148, CDR-H2 as depicted in SEQ ID NO: 149, CDR-H3 as depicted in SEQ ID NO: 919, CDR-L1 as depicted in SEQ ID NO: 316, CDR-L2 as depicted in SEQ ID NO: 317 and CDR-L3 as depicted in SEQ ID NO: 938,
CDR-H1 as depicted in SEQ ID NO: 142, CDR-H2 as depicted in SEQ ID NO: 143, CDR-H3 as depicted in SEQ ID NO: 144, CDR-L1 as depicted in SEQ ID NO: 310, CDR-L2 as depicted in SEQ ID NO: 311 and CDR-L3 as depicted in SEQ ID NO: 935,
CDR-H1 as depicted in SEQ ID NO: 142, CDR-H2 as depicted in SEQ ID NO: 143, CDR-H3 as depicted in SEQ ID NO: 918, CDR-L1 as depicted in SEQ ID NO: 310, CDR-L2 as depicted in SEQ ID NO: 311 and CDR-L3 as depicted in SEQ ID NO: 935,
CDR-H1 as depicted in SEQ ID NO: 142, CDR-H2 as depicted in SEQ ID NO: 143, CDR-H3 as depicted in SEQ ID NO: 918, CDR-L1 as depicted in SEQ ID NO: 310, CDR-L2 as depicted in SEQ ID NO: 311 and CDR-L3 as depicted in SEQ ID NO: 936,
CDR-H1 as depicted in SEQ ID NO: 136, CDR-H2 as depicted in SEQ ID NO: 137, CDR-H3 as depicted in SEQ ID NO: 138, CDR-L1 as depicted in SEQ ID NO: 304, CDR-L2 as depicted in SEQ ID NO: 305 and CDR-L3 as depicted in SEQ ID NO: 933,
CDR-H1 as depicted in SEQ ID NO: 136, CDR-H2 as depicted in SEQ ID NO: 137, CDR-H3 as depicted in SEQ ID NO: 917, CDR-L1 as depicted in SEQ ID NO: 304, CDR-L2 as depicted in SEQ ID NO: 305 and CDR-L3 as depicted in SEQ ID NO: 934,
CDR-H1 as depicted in SEQ ID NO: 130, CDR-H2 as depicted in SEQ ID NO: 131, CDR-H3 as depicted in SEQ ID NO: 132, CDR-L1 as depicted in SEQ ID NO: 298, CDR-L2 as depicted in SEQ ID NO: 299 and CDR-L3 as depicted in SEQ ID NO: 930,
CDR-H1 as depicted in SEQ ID NO: 130, CDR-H2 as depicted in SEQ ID NO: 131, CDR-H3 as depicted in SEQ ID NO: 916, CDR-L1 as depicted in SEQ ID NO: 298, CDR-L2 as depicted in SEQ ID NO: 299 and CDR-L3 as depicted in SEQ ID NO: 931,
CDR-H1 as depicted in SEQ ID NO: 130, CDR-H2 as depicted in SEQ ID NO: 131, CDR-H3 as depicted in SEQ ID NO: 916, CDR-L1 as depicted in SEQ ID NO: 298, CDR-L2 as depicted in SEQ ID NO: 299 and CDR-L3 as depicted in SEQ ID NO: 932,
CDR-H1 as depicted in SEQ ID NO: 1009, CDR-H2 as depicted in SEQ ID NO: 1010, CDR-H3 as depicted in SEQ ID NO: 1011, CDR-L1 as depicted in SEQ ID NO: 1012, CDR-L2 as depicted in SEQ ID NO: 1013 and CDR-L3 as depicted in SEQ ID NO: 1014,
CDR-H1 as depicted in SEQ ID NO: 1022, CDR-H2 as depicted in SEQ ID NO: 1023, CDR-H3 as depicted in SEQ ID NO: 1024, CDR-L1 as depicted in SEQ ID NO: 1025, CDR-L2 as depicted in SEQ ID NO: 1026 and CDR-L3 as depicted in SEQ ID NO: 1027,
CDR-H1 as depicted in SEQ ID NO: 1035, CDR-H2 as depicted in SEQ ID NO: 1036, CDR-H3 as depicted in SEQ ID NO: 1037, CDR-L1 as depicted in SEQ ID NO: 1038, CDR-L2 as depicted in SEQ ID NO: 1039 and CDR-L3 as depicted in SEQ ID NO: 1040,
CDR-H1 as depicted in SEQ ID NO: 1074, CDR-H2 as depicted in SEQ ID NO: 1075, CDR-H3 as depicted in SEQ ID NO: 1076, CDR-L1 as depicted in SEQ ID NO: 1077, CDR-L2 as depicted in SEQ ID NO: 1078 and CDR-L3 as depicted in SEQ ID NO: 1079,
CDR-H1 as depicted in SEQ ID NO: 1100, CDR-H2 as depicted in SEQ ID NO: 1101, CDR-H3 as depicted in SEQ ID NO: 1102, CDR-L1 as depicted in SEQ ID NO: 1103, CDR-L2 as depicted in SEQ ID NO: 1104 and CDR-L3 as depicted in SEQ ID NO: 1105,
CDR-H1 as depicted in SEQ ID NO: 1113, CDR-H2 as depicted in SEQ ID NO: 1114, CDR-H3 as depicted in SEQ ID NO: 1115, CDR-L1 as depicted in SEQ ID NO: 1116, CDR-L2 as depicted in SEQ ID NO: 1117 and CDR-L3 as depicted in SEQ ID NO: 1118,
CDR-H1 as depicted in SEQ ID NO: 1243, CDR-H2 as depicted in SEQ ID NO: 1244, CDR-H3 as depicted in SEQ ID NO: 1245, CDR-L1 as depicted in SEQ ID NO: 1246, CDR-L2 as depicted in SEQ ID NO: 1247 and CDR-L3 as depicted in SEQ ID NO: 1248,
CDR-H1 as depicted in SEQ ID NO: 1256, CDR-H2 as depicted in SEQ ID NO: 1257, CDR-H3 as depicted in SEQ ID NO: 1258, CDR-L1 as depicted in SEQ ID NO: 1259, CDR-L2 as depicted in SEQ ID NO: 1260 and CDR-L3 as depicted in SEQ ID NO: 1261,
CDR-H1 as depicted in SEQ ID NO: 1269, CDR-H2 as depicted in SEQ ID NO: 1270, CDR-H3 as depicted in SEQ ID NO: 1271, CDR-L1 as depicted in SEQ ID NO: 1272, CDR-L2 as depicted in SEQ ID NO: 1273 and CDR-L3 as depicted in SEQ ID NO: 1274,
CDR-H1 as depicted in SEQ ID NO: 1282, CDR-H2 as depicted in SEQ ID NO: 1283, CDR-H3 as depicted in SEQ ID NO: 1284, CDR-L1 as depicted in SEQ ID NO: 1285, CDR-L2 as depicted in SEQ ID NO: 1286 and CDR-L3 as depicted in SEQ ID NO: 1287, and
CDR-H1 as depicted in SEQ ID NO: 1295, CDR-H2 as depicted in SEQ ID NO: 1296, CDR-H3 as depicted in SEQ ID NO: 1297, CDR-L1 as depicted in SEQ ID NO: 1298, CDR-L2 as depicted in SEQ ID NO: 1299 and CDR-L3 as depicted in SEQ ID NO: 1300;
(c) CDR-H1 as depicted in SEQ ID NO: 94, CDR-H2 as depicted in SEQ ID NO: 95, CDR-H3 as depicted in SEQ ID NO: 96, CDR-L1 as depicted in SEQ ID NO: 262, CDR-L2 as depicted in SEQ ID NO: 263 and CDR-L3 as depicted in SEQ ID NO: 264,
CDR-H1 as depicted in SEQ ID NO: 100, CDR-H2 as depicted in SEQ ID NO: 101, CDR-H3 as depicted in SEQ ID NO: 102, CDR-L1 as depicted in SEQ ID NO: 268, CDR-L2 as depicted in SEQ ID NO: 269 and CDR-L3 as depicted in SEQ ID NO: 270,
CDR-H1 as depicted in SEQ ID NO: 118, CDR-H2 as depicted in SEQ ID NO: 119, CDR-H3 as depicted in SEQ ID NO: 120, CDR-L1 as depicted in SEQ ID NO: 286, CDR-L2 as depicted in SEQ ID NO: 287 and CDR-L3 as depicted in SEQ ID NO: 288,
CDR-H1 as depicted in SEQ ID NO: 154, CDR-H2 as depicted in SEQ ID NO: 155, CDR-H3 as depicted in SEQ ID NO: 156, CDR-L1 as depicted in SEQ ID NO: 322, CDR-L2 as depicted in SEQ ID NO: 323 and CDR-L3 as depicted in SEQ ID NO: 324,
CDR-H1 as depicted in SEQ ID NO: 100, CDR-H2 as depicted in SEQ ID NO: 101, CDR-H3 as depicted in SEQ ID NO: 912, CDR-L1 as depicted in SEQ ID NO: 268, CDR-L2 as depicted in SEQ ID NO: 269 and CDR-L3 as depicted in SEQ ID NO: 270,
CDR-H1 as depicted in SEQ ID NO: 100, CDR-H2 as depicted in SEQ ID NO: 101, CDR-H3 as depicted in SEQ ID NO: 913, CDR-L1 as depicted in SEQ ID NO: 268, CDR-L2 as depicted in SEQ ID NO: 269 and CDR-L3 as depicted in SEQ ID NO: 270,
CDR-H1 as depicted in SEQ ID NO: 94, CDR-H2 as depicted in SEQ ID NO: 95, CDR-H3 as depicted in SEQ ID NO: 910, CDR-L1 as depicted in SEQ ID NO: 262, CDR-L2 as depicted in SEQ ID NO: 263 and CDR-L3 as depicted in SEQ ID NO: 264,
CDR-H1 as depicted in SEQ ID NO: 94, CDR-H2 as depicted in SEQ ID NO: 95, CDR-H3 as depicted in SEQ ID NO: 911, CDR-L1 as depicted in SEQ ID NO: 262, CDR-L2 as depicted in SEQ ID NO: 263 and CDR-L3 as depicted in SEQ ID NO: 264,
CDR-H1 as depicted in SEQ ID NO: 118, CDR-H2 as depicted in SEQ ID NO: 119, CDR-H3 as depicted in SEQ ID NO: 120, CDR-L1 as depicted in SEQ ID NO: 286, CDR-L2 as depicted in SEQ ID NO: 287 and CDR-L3 as depicted in SEQ ID NO: 288,
CDR-H1 as depicted in SEQ ID NO: 118, CDR-H2 as depicted in SEQ ID NO: 914, CDR-H3 as depicted in SEQ ID NO: 120, CDR-L1 as depicted in SEQ ID NO: 286, CDR-L2 as depicted in SEQ ID NO: 287 and CDR-L3 as depicted in SEQ ID NO: 288,
CDR-H1 as depicted in SEQ ID NO: 154, CDR-H2 as depicted in SEQ ID NO: 155, CDR-H3 as depicted in SEQ ID NO: 920, CDR-L1 as depicted in SEQ ID NO: 322, CDR-L2 as depicted in SEQ ID NO: 323 and CDR-L3 as depicted in SEQ ID NO: 324,
CDR-H1 as depicted in SEQ ID NO: 996, CDR-H2 as depicted in SEQ ID NO: 997, CDR-H3 as depicted in SEQ ID NO: 998, CDR-L1 as depicted in SEQ ID NO: 999, CDR-L2 as depicted in SEQ ID NO: 1000 and CDR-L3 as depicted in SEQ ID NO: 1001,
CDR-H1 as depicted in SEQ ID NO: 1048, CDR-H2 as depicted in SEQ ID NO: 1049, CDR-H3 as depicted in SEQ ID NO: 1050, CDR-L1 as depicted in SEQ ID NO: 1051, CDR-L2 as depicted in SEQ ID NO: 1052 and CDR-L3 as depicted in SEQ ID NO: 1053, and
CDR-H1 as depicted in SEQ ID NO: 1087, CDR-H2 as depicted in SEQ ID NO: 1088, CDR-H3 as depicted in SEQ ID NO: 1089, CDR-L1 as depicted in SEQ ID NO: 1090, CDR-L2 as depicted in SEQ ID NO: 1091 and CDR-L3 as depicted in SEQ ID NO: 1092;
(d) CDR-H1 as depicted in SEQ ID NO: 4, CDR-H2 as depicted in SEQ ID NO: 5, CDR-H3 as depicted in SEQ ID NO: 6, CDR-L1 as depicted in SEQ ID NO: 172, CDR-L2 as depicted in SEQ ID NO: 173 and CDR-L3 as depicted in SEQ ID NO: 174,
CDR-H1 as depicted in SEQ ID NO: 10, CDR-H2 as depicted in SEQ ID NO: 11, CDR-H3 as depicted in SEQ ID NO: 12, CDR-L1 as depicted in SEQ ID NO: 178, CDR-L2 as depicted in SEQ ID NO: 179 and CDR-L3 as depicted in SEQ ID NO: 180,
CDR-H1 as depicted in SEQ ID NO: 28, CDR-H2 as depicted in SEQ ID NO: 29, CDR-H3 as depicted in SEQ ID NO: 30, CDR-L1 as depicted in SEQ ID NO: 196, CDR-L2 as depicted in SEQ ID NO: 197 and CDR-L3 as depicted in SEQ ID NO: 198,
CDR-H1 as depicted in SEQ ID NO: 34, CDR-H2 as depicted in SEQ ID NO: 35, CDR-H3 as depicted in SEQ ID NO: 36, CDR-L1 as depicted in SEQ ID NO: 202, CDR-L2 as depicted in SEQ ID NO: 203 and CDR-L3 as depicted in SEQ ID NO: 204,
CDR-H1 as depicted in SEQ ID NO: 46, CDR-H2 as depicted in SEQ ID NO: 47, CDR-H3 as depicted in SEQ ID NO: 48, CDR-L1 as depicted in SEQ ID NO: 214, CDR-L2 as depicted in SEQ ID NO: 215 and CDR-L3 as depicted in SEQ ID NO: 216,
CDR-H1 as depicted in SEQ ID NO: 58, CDR-H2 as depicted in SEQ ID NO: 59, CDR-H3 as depicted in SEQ ID NO: 60, CDR-L1 as depicted in SEQ ID NO: 226, CDR-L2 as depicted in SEQ ID NO: 227 and CDR-L3 as depicted in SEQ ID NO: 228,
CDR-H1 as depicted in SEQ ID NO: 64, CDR-H2 as depicted in SEQ ID NO: 65, CDR-H3 as depicted in SEQ ID NO: 66, CDR-L1 as depicted in SEQ ID NO: 232, CDR-L2 as depicted in SEQ ID NO: 233 and CDR-L3 as depicted in SEQ ID NO: 234,
CDR-H1 as depicted in SEQ ID NO: 70, CDR-H2 as depicted in SEQ ID NO: 71, CDR-H3 as depicted in SEQ ID NO: 72, CDR-L1 as depicted in SEQ ID NO: 238, CDR-L2 as depicted in SEQ ID NO: 239 and CDR-L3 as depicted in SEQ ID NO: 240,
CDR-H1 as depicted in SEQ ID NO: 160, CDR-H2 as depicted in SEQ ID NO: 161, CDR-H3 as depicted in SEQ ID NO: 162, CDR-L1 as depicted in SEQ ID NO: 328, CDR-L2 as depicted in SEQ ID NO: 329 and CDR-L3 as depicted in SEQ ID NO: 330,
CDR-H1 as depicted in SEQ ID NO: 46, CDR-H2 as depicted in SEQ ID NO: 47, CDR-H3 as depicted in SEQ ID NO: 48, CDR-L1 as depicted in SEQ ID NO: 924, CDR-L2 as depicted in SEQ ID NO: 215 and CDR-L3 as depicted in SEQ ID NO: 216,
CDR-H1 as depicted in SEQ ID NO: 46, CDR-H2 as depicted in SEQ ID NO: 47, CDR-H3 as depicted in SEQ ID NO: 902, CDR-L1 as depicted in SEQ ID NO: 924, CDR-L2 as depicted in SEQ ID NO: 215 and CDR-L3 as depicted in SEQ ID NO: 216,
CDR-H1 as depicted in SEQ ID NO: 46, CDR-H2 as depicted in SEQ ID NO: 47, CDR-H3 as depicted in SEQ ID NO: 903, CDR-L1 as depicted in SEQ ID NO: 924, CDR-L2 as depicted in SEQ ID NO: 215 and CDR-L3 as depicted in SEQ ID NO: 216,
CDR-H1 as depicted in SEQ ID NO: 46, CDR-H2 as depicted in SEQ ID NO: 47, CDR-H3 as depicted in SEQ ID NO: 48, CDR-L1 as depicted in SEQ ID NO: 925, CDR-L2 as depicted in SEQ ID NO: 215 and CDR-L3 as depicted in SEQ ID NO: 216,
CDR-H1 as depicted in SEQ ID NO: 70, CDR-H2 as depicted in SEQ ID NO: 907, CDR-H3 as depicted in SEQ ID NO: 72, CDR-L1 as depicted in SEQ ID NO: 238, CDR-L2 as depicted in SEQ ID NO: 239 and CDR-L3 as depicted in SEQ ID NO: 240,
CDR-H1 as depicted in SEQ ID NO: 70, CDR-H2 as depicted in SEQ ID NO: 907, CDR-H3 as depicted in SEQ ID NO: 908, CDR-L1 as depicted in SEQ ID NO: 238, CDR-L2 as depicted in SEQ ID NO: 239 and CDR-L3 as depicted in SEQ ID NO: 240,
CDR-H1 as depicted in SEQ ID NO: 28, CDR-H2 as depicted in SEQ ID NO: 901, CDR-H3 as depicted in SEQ ID NO: 30, CDR-L1 as depicted in SEQ ID NO: 922, CDR-L2 as depicted in SEQ ID NO: 197 and CDR-L3 as depicted in SEQ ID NO: 923,
CDR-H1 as depicted in SEQ ID NO: 58, CDR-H2 as depicted in SEQ ID NO: 905, CDR-H3 as depicted in SEQ ID NO: 906, CDR-L1 as depicted in SEQ ID NO: 226, CDR-L2 as depicted in SEQ ID NO: 227 and CDR-L3 as depicted in SEQ ID NO: 228,
CDR-H1 as depicted in SEQ ID NO: 58, CDR-H2 as depicted in SEQ ID NO: 905, CDR-H3 as depicted in SEQ ID NO: 60, CDR-L1 as depicted in SEQ ID NO: 226, CDR-L2 as depicted in SEQ ID NO: 227 and CDR-L3 as depicted in SEQ ID NO: 228,
CDR-H1 as depicted in SEQ ID NO: 160, CDR-H2 as depicted in SEQ ID NO: 161, CDR-H3 as depicted in SEQ ID NO: 162, CDR-L1 as depicted in SEQ ID NO: 939, CDR-L2 as depicted in SEQ ID NO: 329 and CDR-L3 as depicted in SEQ ID NO: 330,
CDR-H1 as depicted in SEQ ID NO: 160, CDR-H2 as depicted in SEQ ID NO: 921, CDR-H3 as depicted in SEQ ID NO: 162, CDR-L1 as depicted in SEQ ID NO: 939, CDR-L2 as depicted in SEQ ID NO: 329 and CDR-L3 as depicted in SEQ ID NO: 940,
CDR-H1 as depicted in SEQ ID NO: 160, CDR-H2 as depicted in SEQ ID NO: 161, CDR-H3 as depicted in SEQ ID NO: 162, CDR-L1 as depicted in SEQ ID NO: 941, CDR-L2 as depicted in SEQ ID NO: 329 and CDR-L3 as depicted in SEQ ID NO: 330,
CDR-H1 as depicted in SEQ ID NO: 28, CDR-H2 as depicted in SEQ ID NO: 29, CDR-H3 as depicted in SEQ ID NO: 30, CDR-L1 as depicted in SEQ ID NO: 196, CDR-L2 as depicted in SEQ ID NO: 197 and CDR-L3 as depicted in SEQ ID NO: 923,
CDR-H1 as depicted in SEQ ID NO: 28, CDR-H2 as depicted in SEQ ID NO: 29, CDR-H3 as depicted in SEQ ID NO: 30, CDR-L1 as depicted in SEQ ID NO: 922, CDR-L2 as depicted in SEQ ID NO: 197 and CDR-L3 as depicted in SEQ ID NO: 923,
CDR-H1 as depicted in SEQ ID NO: 28, CDR-H2 as depicted in SEQ ID NO: 901, CDR-H3 as depicted in SEQ ID NO: 30, CDR-L1 as depicted in SEQ ID NO: 922, CDR-L2 as depicted in SEQ ID NO: 197 and CDR-L3 as depicted in SEQ ID NO: 923,
CDR-H1 as depicted in SEQ ID NO: 28, CDR-H2 as depicted in SEQ ID NO: 29, CDR-H3 as depicted in SEQ ID NO: 30, CDR-L1 as depicted in SEQ ID NO: 939, CDR-L2 as depicted in SEQ ID NO: 329 and CDR-L3 as depicted in SEQ ID NO: 330,
CDR-H1 as depicted in SEQ ID NO: 970, CDR-H2 as depicted in SEQ ID NO: 971, CDR-H3 as depicted in SEQ ID NO: 972, CDR-L1 as depicted in SEQ ID NO: 973, CDR-L2 as depicted in SEQ ID NO: 974 and CDR-L3 as depicted in SEQ ID NO: 975,
CDR-H1 as depicted in SEQ ID NO: 1061, CDR-H2 as depicted in SEQ ID NO: 1062, CDR-H3 as depicted in SEQ ID NO: 1063, CDR-L1 as depicted in SEQ ID NO: 1064, CDR-L2 as depicted in SEQ ID NO: 1065 and CDR-L3 as depicted in SEQ ID NO: 1066,
CDR-H1 as depicted in SEQ ID NO: 1139, CDR-H2 as depicted in SEQ ID NO: 1140, CDR-H3 as depicted in SEQ ID NO: 1141, CDR-L1 as depicted in SEQ ID NO: 1142, CDR-L2 as depicted in SEQ ID NO: 1143 and CDR-L3 as depicted in SEQ ID NO: 1144,
CDR-H1 as depicted in SEQ ID NO: 1152, CDR-H2 as depicted in SEQ ID NO: 1153, CDR-H3 as depicted in SEQ ID NO: 1154, CDR-L1 as depicted in SEQ ID NO: 1155, CDR-L2 as depicted in SEQ ID NO: 1156 and CDR-L3 as depicted in SEQ ID NO: 1157,
CDR-H1 as depicted in SEQ ID NO: 1178, CDR-H2 as depicted in SEQ ID NO: 1179, CDR-H3 as depicted in SEQ ID NO: 1180, CDR-L1 as depicted in SEQ ID NO: 1181, CDR-L2 as depicted in SEQ ID NO: 1182 and CDR-L3 as depicted in SEQ ID NO: 1183,
CDR-H1 as depicted in SEQ ID NO: 1191, CDR-H2 as depicted in SEQ ID NO: 1192, CDR-H3 as depicted in SEQ ID NO: 1193, CDR-L1 as depicted in SEQ ID NO: 1194, CDR-L2 as depicted in SEQ ID NO: 1195 and CDR-L3 as depicted in SEQ ID NO: 1196,
CDR-H1 as depicted in SEQ ID NO: 1204, CDR-H2 as depicted in SEQ ID NO: 1205, CDR-H3 as depicted in SEQ ID NO: 1206, CDR-L1 as depicted in SEQ ID NO: 1207, CDR-L2 as depicted in SEQ ID NO: 1208 and CDR-L3 as depicted in SEQ ID NO: 1209,
CDR-H1 as depicted in SEQ ID NO: 1217, CDR-H2 as depicted in SEQ ID NO: 1218, CDR-H3 as depicted in SEQ ID NO: 1219, CDR-L1 as depicted in SEQ ID NO: 1220, CDR-L2 as depicted in SEQ ID NO: 1221 and CDR-L3 as depicted in SEQ ID NO: 1222,
CDR-H1 as depicted in SEQ ID NO: 1230, CDR-H2 as depicted in SEQ ID NO: 1231, CDR-H3 as depicted in SEQ ID NO: 1232, CDR-L1 as depicted in SEQ ID NO: 1233, CDR-L2 as depicted in SEQ ID NO: 1234 and CDR-L3 as depicted in SEQ ID NO: 1235,
CDR-H1 as depicted in SEQ ID NO: 1308, CDR-H2 as depicted in SEQ ID NO: 1309, CDR-H3 as depicted in SEQ ID NO: 1310, CDR-L1 as depicted in SEQ ID NO: 1311, CDR-L2 as depicted in SEQ ID NO: 1312 and CDR-L3 as depicted in SEQ ID NO: 1313,
CDR-H1 as depicted in SEQ ID NO: 1321, CDR-H2 as depicted in SEQ ID NO: 1322, CDR-H3 as depicted in SEQ ID NO: 1323, CDR-L1 as depicted in SEQ ID NO: 1324, CDR-L2 as depicted in SEQ ID NO: 1325 and CDR-L3 as depicted in SEQ ID NO: 1326,
CDR-H1 as depicted in SEQ ID NO: 1373, CDR-H2 as depicted in SEQ ID NO: 1374, CDR-H3 as depicted in SEQ ID NO: 1375, CDR-L1 as depicted in SEQ ID NO: 1376, CDR-L2 as depicted in SEQ ID NO: 1377 and CDR-L3 as depicted in SEQ ID NO: 1378,
CDR-H1 as depicted in SEQ ID NO: 1386, CDR-H2 as depicted in SEQ ID NO: 1387, CDR-H3 as depicted in SEQ ID NO: 1388, CDR-L1 as depicted in SEQ ID NO: 1389, CDR-L2 as depicted in SEQ ID NO: 1390 and CDR-L3 as depicted in SEQ ID NO: 1391,
CDR-H1 as depicted in SEQ ID NO: 1399, CDR-H2 as depicted in SEQ ID NO: 1400, CDR-H3 as depicted in SEQ ID NO: 1401, CDR-L1 as depicted in SEQ ID NO: 1402, CDR-L2 as depicted in SEQ ID NO: 1403 and CDR-L3 as depicted in SEQ ID NO: 1404,
CDR-H1 as depicted in SEQ ID NO: 1412, CDR-H2 as depicted in SEQ ID NO: 1413, CDR-H3 as depicted in SEQ ID NO: 1414, CDR-L1 as depicted in SEQ ID NO: 1415, CDR-L2 as depicted in SEQ ID NO: 1416 and CDR-L3 as depicted in SEQ ID NO: 1417; and
(e) CDR-H1 as depicted in SEQ ID NO: 76, CDR-H2 as depicted in SEQ ID NO: 77, CDR-H3 as depicted in SEQ ID NO: 78, CDR-L1 as depicted in SEQ ID NO: 244, CDR-L2 as depicted in SEQ ID NO: 245 and CDR-L3 as depicted in SEQ ID NO: 246,
CDR-H1 as depicted in SEQ ID NO: 88, CDR-H2 as depicted in SEQ ID NO: 89, CDR-H3 as depicted in SEQ ID NO: 90, CDR-L1 as depicted in SEQ ID NO: 256, CDR-L2 as depicted in SEQ ID NO: 257 and CDR-L3 as depicted in SEQ ID NO: 258,
CDR-H1 as depicted in SEQ ID NO: 106, CDR-H2 as depicted in SEQ ID NO: 107, CDR-H3 as depicted in SEQ ID NO: 108, CDR-L1 as depicted in SEQ ID NO: 274, CDR-L2 as depicted in SEQ ID NO: 275 and CDR-L3 as depicted in SEQ ID NO: 276,
CDR-H1 as depicted in SEQ ID NO: 112, CDR-H2 as depicted in SEQ ID NO: 113, CDR-H3 as depicted in SEQ ID NO: 114, CDR-L1 as depicted in SEQ ID NO: 280, CDR-L2 as depicted in SEQ ID NO: 281 and CDR-L3 as depicted in SEQ ID NO: 282,
CDR-H1 as depicted in SEQ ID NO: 106, CDR-H2 as depicted in SEQ ID NO: 107, CDR-H3 as depicted in SEQ ID NO: 108, CDR-L1 as depicted in SEQ ID NO: 274, CDR-L2 as depicted in SEQ ID NO: 275 and CDR-L3 as depicted in SEQ ID NO: 276, and
CDR-H1 as depicted in SEQ ID NO: 983, CDR-H2 as depicted in SEQ ID NO: 984, CDR-H3 as depicted in SEQ ID NO: 985, CDR-L1 as depicted in SEQ ID NO: 986, CDR-L2 as depicted in SEQ ID NO: 987 and CDR-L3 as depicted in SEQ ID NO: 988.

3. The antibody construct according to claim 2, wherein the first binding domain comprises a VH region selected from the group consisting of VH regions
(a) as depicted in SEQ ID NO: 362, SEQ ID NO: 364, SEQ ID NO: 485, SEQ ID NO: 486, SEQ ID NO: 487, SEQ ID NO: 492, SEQ ID NO: 493, SEQ ID NO: 494, SEQ ID NO:495, SEQ ID NO:1133, SEQ ID NO:1172, SEQ ID NO:1341, SEQ ID NO: 1354, SEQ ID NO: 1367, SEQ ID NO: 1432, and SEQ ID NO: 1445;
(b) as depicted in SEQ ID NO: 342, SEQ ID NO: 366, SEQ ID NO: 370, SEQ ID NO: 344, SEQ ID NO: 372, SEQ ID NO: 368, SEQ ID NO: 496, SEQ ID NO: 497, SEQ ID NO: 498, SEQ ID NO: 499, SEQ ID NO: 500, SEQ ID NO: 508, SEQ ID NO: 509, SEQ ID NO: 510, SEQ ID NO: 511, SEQ ID NO: 512, SEQ ID NO: 519, SEQ ID NO: 520, SEQ ID NO: 521, SEQ ID NO: 522, SEQ ID NO: 523, SEQ ID NO: 524, SEQ ID NO: 525, SEQ ID NO: 526, SEQ ID NO: 527, SEQ ID NO: 528, SEQ ID NO: 529, SEQ ID NO: 530, SEQ ID NO: 531, SEQ ID NO: 532, SEQ ID NO: 533, SEQ ID NO: 534, SEQ ID NO: 535, SEQ ID NO: 536, SEQ ID NO: 537, SEQ ID NO: 538, SEQ ID NO: 1016, SEQ ID NO: 1029, SEQ ID NO: 1042, SEQ ID NO: 1081, SEQ ID NO: 1107, SEQ ID NO: 1120, SEQ ID NO: 1250, SEQ ID NO: 1263, SEQ ID NO: 1276, SEQ ID NO: 1289, and SEQ ID NO: 1302;
(c) as depicted in SEQ ID NO: 338, SEQ ID NO: 354, SEQ ID NO: 378, SEQ ID NO: 356, SEQ ID NO: 476, SEQ ID NO: 477, SEQ ID NO: 478, SEQ ID NO: 479, SEQ ID NO: 480, SEQ ID NO: 481, SEQ ID NO: 482, SEQ ID NO: 483, SEQ ID NO: 484, SEQ ID NO: 501, SEQ ID NO: 502, SEQ ID NO: 503, SEQ ID NO: 504, SEQ ID NO: 505, SEQ ID NO: 506, SEQ ID NO: 517, SEQ ID NO: 518, SEQ ID NO: 1003, SEQ ID NO: 1055, and SEQ ID NO: 1094;
(d) as depicted in SEQ ID NO: 352, SEQ ID NO: 360, SEQ ID NO: 388, SEQ ID NO: 386, SEQ ID NO: 340, SEQ ID NO: 346, SEQ ID NO: 374, SEQ ID NO: 348, SEQ ID NO: 390, SEQ ID NO: 463, SEQ ID NO: 464, SEQ ID NO: 465, SEQ ID NO: 466, SEQ ID NO: 467, SEQ ID NO: 468, SEQ ID NO: 469, SEQ ID NO: 470, SEQ ID NO: 471, SEQ ID NO: 472, SEQ ID NO: 473, SEQ ID NO: 474, SEQ ID NO: 475, SEQ ID NO: 488, SEQ ID NO: 489, SEQ ID NO: 490, SEQ ID NO: 491, SEQ ID NO: 513, SEQ ID NO: 514, SEQ ID NO: 515, SEQ ID NO: 516, SEQ ID NO: 540, SEQ ID NO: 541, SEQ ID NO: 542, SEQ ID NO: 543, SEQ ID NO: 977, SEQ ID NO: 1068, SEQ ID NO: 1146, SEQ ID NO: 1159, SEQ ID NO: 1185, SEQ ID NO: 1198, SEQ ID NO: 1211, SEQ ID NO: 1224, SEQ ID NO: 1237, SEQ ID NO: 1315, SEQ ID NO: 1328, SEQ ID NO: 1380, SEQ ID NO: 1393, SEQ ID NO: 1406, and SEQ ID NO: 1419; and
(e) as depicted in SEQ ID NO: 376, SEQ ID NO: 392, SEQ ID NO: 358, SEQ ID NO: 350, SEQ ID NO: 507, and SEQ ID NO: 990.

4. The antibody construct according to claim 2, wherein the first binding domain comprises a VL region selected from the group consisting of VL regions
(a) as depicted in SEQ ID NO: 418, SEQ ID NO: 420, SEQ ID NO: 580, SEQ ID NO: 581, SEQ ID NO: 582, SEQ ID NO: 587, SEQ ID NO: 588, SEQ ID NO: 589, SEQ ID NO:590, SEQ ID NO:1135, SEQ ID NO:1174, SEQ ID NO:1343, SEQ ID NO: 1356, SEQ ID NO: 1369, SEQ ID NO: 1434, and SEQ ID NO: 1447;
(b) as depicted in SEQ ID NO: 398, SEQ ID NO: 422, SEQ ID NO: 426, SEQ ID NO: 400, SEQ ID NO: 428, SEQ ID NO: 424, SEQ ID NO: 591, SEQ ID NO: 592, SEQ ID NO: 593, SEQ ID NO: 594, SEQ ID NO: 595, SEQ ID NO: 603, SEQ ID NO: 604, SEQ ID NO: 605, SEQ ID NO: 606, SEQ ID NO: 607, SEQ ID NO: 614, SEQ ID NO: 615, SEQ ID NO: 616, SEQ ID NO: 617, SEQ ID NO: 618, SEQ ID NO: 619, SEQ ID NO: 620, SEQ ID NO: 621, SEQ ID NO: 622, SEQ ID NO: 623, SEQ ID NO: 624, SEQ ID NO: 625, SEQ ID NO: 626, SEQ ID NO: 627, SEQ ID NO: 628, SEQ ID NO: 629, SEQ ID NO: 630, SEQ ID NO: 631, SEQ ID NO: 632, SEQ ID NO: 633, SEQ ID NO: 1018, SEQ ID NO: 1031, SEQ ID NO: 1044, SEQ ID NO: 1083, SEQ ID NO: 1109, SEQ ID NO: 1122, SEQ ID NO: 1252, SEQ ID NO: 1265, SEQ ID NO: 1278, SEQ ID NO: 1291, and SEQ ID NO: 1304;
(c) as depicted in SEQ ID NO: 394, SEQ ID NO: 410, SEQ ID NO: 434, SEQ ID NO: 412, SEQ ID NO: 571, SEQ ID NO: 572, SEQ ID NO: 573, SEQ ID NO: 574, SEQ ID NO: 575, SEQ ID NO: 576, SEQ ID NO: 577, SEQ ID NO: 578, SEQ ID NO: 579, SEQ ID NO: 596, SEQ ID NO: 597, SEQ ID NO: 598, SEQ ID NO: 599, SEQ ID NO: 600, SEQ ID NO: 601, SEQ ID NO: 612, SEQ ID NO: 613, SEQ ID NO: 1005, SEQ ID NO: 1057, and SEQ ID NO: 1096;
(d) as depicted in SEQ ID NO: 408, SEQ ID NO: 416, SEQ ID NO: 444, SEQ ID NO: 442, SEQ ID NO: 396, SEQ ID NO: 402, SEQ ID NO: 430, SEQ ID NO: 404, SEQ ID NO: 446, SEQ ID NO: 558, SEQ ID NO: 559, SEQ ID NO: 560, SEQ ID NO: 561, SEQ ID NO: 562, SEQ ID NO: 563, SEQ ID NO: 564, SEQ ID NO: 565, SEQ ID NO: 566, SEQ ID NO: 567, SEQ ID NO: 568, SEQ ID NO: 569, SEQ ID NO: 570, SEQ ID NO: 583, SEQ ID NO: 584, SEQ ID NO: 585, SEQ ID NO: 586, SEQ ID NO: 608, SEQ ID NO: 609, SEQ ID NO: 610, SEQ ID NO: 611, SEQ ID NO: 635, SEQ ID NO: 636, SEQ ID NO: 637, SEQ ID NO: 638, SEQ ID NO: 979, SEQ ID NO: 1070, SEQ ID NO: 1148, SEQ ID NO: 1161, SEQ ID NO: 1187, SEQ ID NO: 1200, SEQ ID NO: 1213, SEQ ID NO: 1226, SEQ ID NO: 1239, SEQ ID NO: 1317, SEQ ID NO: 1330, SEQ ID NO: 1382, SEQ ID NO: 1395, SEQ ID NO: 1408, and SEQ ID NO: 1421; and
(e) as depicted in SEQ ID NO: 432, SEQ ID NO: 448, SEQ ID NO: 414, SEQ ID NO: 406, SEQ ID NO: 602, and SEQ ID NO: 992.

5. The antibody construct according to claim 2, wherein the first binding domain comprises a VH region and a VL region selected from the group consisting of:
(1) pairs of a VH region and a VL region as depicted in SEQ ID NOs: 362+418, SEQ ID NOs: 364+420, SEQ ID NOs: 485+580, SEQ ID NOs: 486+581, SEQ ID NOs: 487+582, SEQ ID NOs: 492+587, SEQ ID NOs: 493+588, SEQ ID NOs: 494+589, SEQ ID NOs: 495+590, SEQ ID NOs: 1133+1135, SEQ ID NOs: 1172+1174, SEQ ID NOs: 1341+1343, SEQ ID NOs: 1354+1356, SEQ ID NOs: 1367+1369, SEQ ID NOs: 1432+1434, and SEQ ID NOs: 1445+1447;
(2) pairs of a VH region and a VL region as depicted in SEQ ID NOs: 342+398, SEQ ID NOs: 366+422, SEQ ID NOs: 370+426, SEQ ID NOs: 344+400, SEQ ID NOs: 372+428, SEQ ID NOs: 368+424, SEQ ID NOs: 496+591, SEQ ID NOs: 497+592, SEQ ID NOs: 498+593, SEQ ID NOs: 499+594, SEQ ID NOs: 500+595, SEQ ID NOs: 508+603, SEQ ID NOs: 509+604, SEQ ID NOs: 510+605, SEQ ID NOs: 511+606, SEQ ID NOs: 512+607, SEQ ID NOs: 519+614, SEQ ID NOs: 520+615, SEQ ID NOs: 521+616, SEQ ID NOs: 522+617, SEQ ID NOs: 523+618, SEQ ID NOs: 524+619, SEQ ID NOs: 525+620, SEQ ID NOs: 526+621, SEQ ID NOs: 527+622, SEQ ID NOs: 528+623, SEQ ID NOs: 529+624, SEQ ID NOs: 530+625, SEQ ID NOs: 531+626, SEQ ID NOs: 532+627, SEQ ID NOs: 533+628, SEQ ID NOs: 534+629, SEQ ID NOs: 535+630, SEQ ID NOs: 536+631, SEQ ID NOs: 537+632, SEQ ID NOs: 538+633, SEQ ID NOs: 1016+1018, SEQ ID NOs: 1029+1031, SEQ ID NOs: 1042+1044, SEQ ID NOs: 1081+1083, SEQ ID NOs: 1107+1109, SEQ ID NOs: 1120+1122, SEQ ID NOs: 1250+1252, SEQ ID NOs: 1263+1265, SEQ ID NOs: 1276+1278, SEQ ID NOs: 1289+1291, and SEQ ID NOs: 1302+1304;
(3) pairs of a VH region and a VL region as depicted in SEQ ID NOs: 338+394, SEQ ID NOs: 354+410, SEQ ID NOs: 378+434, SEQ ID NOs: 356+412, SEQ ID NOs: 476+571, SEQ ID NOs: 477+572, SEQ ID NOs: 478+573, SEQ ID NOs: 479+574, SEQ ID NOs: 480+575, SEQ ID NOs: 481+576, SEQ ID NOs: 482+577, SEQ ID NOs: 483+578, SEQ ID NOs: 484+579, SEQ ID NOs: 501+596, SEQ ID NOs: 502+597, SEQ ID NOs: 503+598, SEQ ID NOs: 504+599, SEQ ID NOs: 505+600, SEQ ID NOs: 506+601, SEQ ID NOs: 517+612, SEQ ID NOs: 518+613, SEQ ID NOs: 1003+1005, SEQ ID NOs: 1055+1057, and SEQ ID NOs: 1094+1096;
(4) pairs of a VH region and a VL region as depicted in SEQ ID NOs: 352+408, SEQ ID NOs: 360+416, SEQ ID NOs: 388+444, SEQ ID NOs: 386+442, SEQ ID NOs: 340+396, SEQ ID NOs: 346+402, SEQ ID NOs: 374+430, SEQ ID NOs: 348+404, SEQ ID NOs: 390+446, SEQ ID NOs: 463+558, SEQ ID NOs: 464+559, SEQ ID NOs: 465+560, SEQ ID NOs: 466+561, SEQ ID NOs: 467+562, SEQ ID NOs: 468+563, SEQ ID NOs: 469+564, SEQ ID NOs: 470+565, SEQ ID NOs: 471+566, SEQ ID NOs: 472+567, SEQ ID NOs: 473+568, SEQ ID NOs: 474+569, SEQ ID NOs: 475+570, SEQ ID NOs: 488+583, SEQ ID NOs: 489+584, SEQ ID NOs: 490+585, SEQ ID NOs: 491+586, SEQ ID NOs: 513+608, SEQ ID NOs: 514+609, SEQ ID NOs: 515+610, SEQ ID NOs: 516+611, SEQ ID NOs: 540+635, SEQ ID NOs: 541+636, SEQ ID NOs: 542+637, SEQ ID NOs: 543+638, SEQ ID NOs: 977+979, SEQ ID NOs: 1068+1070, SEQ ID NOs: 1146+1148, SEQ ID NOs: 1159+1161, SEQ ID NOs: 1185+1187, SEQ ID NOs: 1198+1200, SEQ ID NOs: 1211+1213, SEQ ID NOs: 1224+1226, SEQ ID NOs: 1237+1239, SEQ ID NOs: 1315+1317, SEQ ID NOs: 1328+1330, SEQ ID NOs: 1380, +1382 SEQ ID NOs: 1393+1395, SEQ ID NOs: 1406+1408, and SEQ ID NOs: 1419+1421; and
(5) pairs of a VH region and a VL region as depicted in SEQ ID NOs: 376+432, SEQ ID NOs: 392+448, SEQ ID NOs: 358+414, SEQ ID NOs: 350+406, SEQ ID NOs: 507+602, and SEQ ID NOs: 990+992.

6. The antibody construct according to claim 2, wherein the antibody construct is in a format selected from the group consisting of (scFv)₂, (single domain mAb)₂, scFv-single domain mAb, diabodies and oligomers thereof.

7. The antibody construct according to claim 6, wherein the first binding domain comprises an amino acid sequence selected from the group consisting of
(a) as depicted in SEQ ID NO: 117, SEQ ID NO: 1137, SEQ ID NO: 1176, SEQ ID NO: 1345, SEQ ID NO: 1358, SEQ ID NO: 1371, SEQ ID NO: 1436, and SEQ ID NO: 1449;
(b) as depicted in SEQ ID NO: 1020, SEQ ID NO: 1033, SEQ ID NO: 1046, SEQ ID NO: 1085, SEQ ID NO: 1111, SEQ ID NO: 1124, SEQ ID NO: 1254, SEQ ID NO: 1267, SEQ ID NO: 1280, SEQ ID NO: 1293, and SEQ ID NO: 1306;
(c) as depicted in SEQ ID NO: 1007, SEQ ID NO: 1059, and SEQ ID NO: 1098;
(d) as depicted in SEQ ID NO: 981, SEQ ID NO: 1072, SEQ ID NO: 1150, SEQ ID NO: 1163, SEQ ID NO: 1189, SEQ ID NO: 1202, SEQ ID NO: 1215, SEQ ID NO: 1228, SEQ ID NO: 1241, SEQ ID NO: 1319, SEQ ID NO: 1332, SEQ ID NO: 1384, SEQ ID NO: 1397, SEQ ID NO: 1410, and SEQ ID NO: 1423; and
(e) as depicted in SEQ ID NO: 994.

8. The antibody construct according to claim 2, wherein the second binding domain is capable of binding to human and Callithrix jacchus, Saguinus oedipus or Saimiri sciureus CD3 epsilon.

9. The antibody construct according claim 8, comprising the amino acid sequence selected from the group consisting of
(a) as depicted in SEQ ID NO: 1138, SEQ ID NO: 1177, SEQ ID NO: 1346, SEQ ID NO: 1359, SEQ ID NO: 1372, SEQ ID NO: 1437, and SEQ ID NO: 1450;
(b) as depicted in SEQ ID NO: 1021, SEQ ID NO: 1034, SEQ ID NO: 1047, SEQ ID NO: 1086, SEQ ID NO: 1112, SEQ ID NO: 1125, SEQ ID NO: 1255, SEQ ID NO: 1268, SEQ ID NO: 1281, SEQ ID NO: 1294, and SEQ ID NO: 1307;
(c) as depicted in SEQ ID NO: 1008, SEQ ID NO: 1060, and SEQ ID NO: 1099;
(d) as depicted in SEQ ID NO: 982, SEQ ID NO: 1073, SEQ ID NO: 1151, SEQ ID NO: 1164, SEQ ID NO: 1190, SEQ ID NO: 1203, SEQ ID NO: 1216, SEQ ID NO: 1229, SEQ ID NO: 1242, SEQ ID NO: 1320, SEQ ID NO: 1333, SEQ ID NO: 1385, SEQ ID NO: 1398, SEQ ID NO: 1411, and SEQ ID NO: 1424; and
(e) as depicted in SEQ ID NO: 995.

10. A nucleic acid encoding the antibody construct of claim 1.

11. A vector comprising the nucleic acid of claim 10.

12. A host cell transformed or transfected with the nucleic acid of claim 10.

13. A process for producing an antibody construct, said process comprising culturing the host cell of claim 12 under conditions allowing the expression of the antibody construct and recovering the produced antibody construct from the culture.

14. A composition comprising the antibody construct of claim 1.

15. (canceled)

16. A method for treating or ameliorating a melanoma disease or metastatic melanoma disease, comprising the step of administering to a subject in need thereof the antibody construct according to claim 1.

17. The method according to claim 16, wherein the melanoma disease or metastatic melanoma disease is superficial spreading melanoma, lentigo maligna, lentigo maligna melanoma, acral lentiginous melanoma or nodular melanoma.

18. A kit comprising the antibody construct of claim 1 according to any one of claims 1 to 9, or produced according to the process of claim 13, a vector as defined in claim 11, and/or a host cell as defined in claim 12.

The application's sequence listing, which the Patent Office published only in electronic form, follows.

SEQUENCE LISTING (1515 sequences)

SEQ ID NO: 1 - DNA, 15 bp, artificial
  1D10, 2C12 - CDR-H1
agctatggcatgcac

SEQ ID NO: 2 - DNA, 51 bp, artificial
  1D10, 2C12 - CDR-H2
gttatatggtatgatggaagtaataaatactatgcagactccgtgaagggc

SEQ ID NO: 3 - DNA, 48 bp, artificial
  1D10, 2C12 - CDR-H3
agggccggtataataggaactacaggctactactacggtatggacgtc

SEQ ID NO: 4 - protein, 5 aa, artificial
  1D10, 2C12 - CDR-H1
SYGMH

SEQ ID NO: 5 - protein, 17 aa, artificial
  1D10, 2C12 - CDR-H2
VIWYDGSNKYYADSVKG

SEQ ID NO: 6 - protein, 16 aa, artificial
  1D10, 2C12 - CDR-H3
RAGIIGTTGYYYGMDV

SEQ ID NO: 7 - DNA, 21 bp, artificial
  1F10 - CDR-H1
agtggtggttactactggagc

SEQ ID NO: 8 - DNA, 48 bp, artificial
  1F10 - CDR-H2
tacatctattacagtgggagcacctactacaacccgtccctcacgagt

SEQ ID NO: 9 - DNA, 30 bp, artificial
  1F10 - CDR-H3
gatggaagcagtggctggtacttccagcac

SEQ ID NO: 10 - protein, 7 aa, artificial
  1F10 - CDR-H1
SGGYYWS

SEQ ID NO: 11 - protein, 16 aa, artificial
  1F10 - CDR-H2
YIYYSGSTYYNPSLTS

SEQ ID NO: 12 - protein, 10 aa, artificial
  1F10 - CDR-H3
DGSSGWYFQH

SEQ ID NO: 13 - DNA, 15 bp, artificial
  2C12_LC#1 - CDR-H1
agctatggcatgcac

SEQ ID NO: 14 - DNA, 51 bp, artificial; identical to SEQ ID NO: 2
  2C12_LC#1 - CDR-H2

SEQ ID NO: 15 - DNA, 48 bp, artificial; identical to SEQ ID NO: 3
  2C12_LC#1 - CDR-H3

SEQ ID NO: 16 - protein, 5 aa, artificial
  2C12_LC#1 - CDR-H1
SYGMH

SEQ ID NO: 17 - protein, 17 aa, artificial
  2C12_LC#1 - CDR-H2
VIWYDGSNKYYADSVKG

SEQ ID NO: 18 - protein, 16 aa, artificial
  2C12_LC#1 - CDR-H3
RAGIIGTTGYYYGMDV

SEQ ID NO: 19 - DNA, 15 bp, artificial
  2G6_LC#1 - CDR-H1
agctatggcatgcac

SEQ ID NO: 20 - DNA, 51 bp, artificial
  2G6_LC#1 - CDR-H2
tttatatggtatgatggaagtaataaatactatgcagactccgtgaaggac

SEQ ID NO: 21 - DNA, 48 bp, artificial
  2G6_LC#1 - CDR-H3
agggccggtataataggaactataggctactactacggtatggacgtc

SEQ ID NO: 22 - protein, 5 aa, artificial
  2G6_LC#1 - CDR-H1
SYGMH

SEQ ID NO: 23 - protein, 17 aa, artificial
  2G6_LC#1 - CDR-H2
FIWYDGSNKYYADSVKD

SEQ ID NO: 24 - protein, 16 aa, artificial
  2G6_LC#1 - CDR-H3
RAGIIGTIGYYYGMDV

SEQ ID NO: 25 - DNA, 15 bp, artificial
  2G6 - CDR-H1
agctatggcatgcac

SEQ ID NO: 26 - DNA, 51 bp, artificial; identical to SEQ ID NO: 20
  2G6 - CDR-H2

SEQ ID NO: 27 - DNA, 48 bp, artificial; identical to SEQ ID NO: 21
  2G6 - CDR-H3

SEQ ID NO: 28 - protein, 5 aa, artificial
  2G6 - CDR-H1
SYGMH

SEQ ID NO: 29 - protein, 17 aa, artificial
  2G6 - CDR-H2
FIWYDGSNKYYADSVKD

SEQ ID NO: 30 - protein, 16 aa, artificial
  2G6 - CDR-H3
RAGIIGTIGYYYGMDV

SEQ ID NO: 31 - DNA, 15 bp, artificial
  2H12 - CDR-H1
agctatggcatgcac

SEQ ID NO: 32 - DNA, 51 bp, artificial
  2H12 - CDR-H2
gttatatggtatgatggaagtaataaatactatacagactccgtgaagggc

SEQ ID NO: 33 - DNA, 48 bp, artificial; identical to SEQ ID NO: 3
  2H12 - CDR-H3

SEQ ID NO: 34 - protein, 5 aa, artificial
  2H12 - CDR-H1
SYGMH

SEQ ID NO: 35 - protein, 17 aa, artificial
  2H12 - CDR-H2
VIWYDGSNKYYTDSVKG

SEQ ID NO: 36 - protein, 16 aa, artificial
  2H12 - CDR-H3
RAGIIGTTGYYYGMDV

SEQ ID NO: 37 - DNA, 15 bp, artificial
  2H12_LC#2 - CDR-H1
agctatggcatgcac

SEQ ID NO: 38 - DNA, 51 bp, artificial; identical to SEQ ID NO: 32
  2H12_LC#2 - CDR-H2

SEQ ID NO: 39 - DNA, 48 bp, artificial; identical to SEQ ID NO: 3
  2H12_LC#2 - CDR-H3

SEQ ID NO: 40 - protein, 5 aa, artificial
  2H12_LC#2 - CDR-H1
SYGMH

SEQ ID NO: 41 - protein, 17 aa, artificial
  2H12_LC#2 - CDR-H2
VIWYDGSNKYYTDSVKG

SEQ ID NO: 42 - protein, 16 aa, artificial
  2H12_LC#2 - CDR-H3
RAGIIGTTGYYYGMDV

SEQ ID NO: 43 - DNA, 21 bp, artificial
  4A2, 5B4, 5C5   - CDR-H1
agtagtggttactactggagc

SEQ ID NO: 44 - DNA, 48 bp, artificial
  4A2, 5B4, 5C5  - CDR-H2
tacatctattacactgggagcgcctactacaacccgtccctcaagagt

SEQ ID NO: 45 - DNA, 30 bp, artificial
  4A2, 5B4, 5C5  - CDR-H3
gatggaagcagtggctggtacttccagtat

SEQ ID NO: 46 - protein, 7 aa, artificial
  4A2, 5B4, 5C5  - CDR-H1
SSGYYWS

SEQ ID NO: 47 - protein, 16 aa, artificial
  4A2, 5B4, 5C5  - CDR-H2
YIYYTGSAYYNPSLKS

SEQ ID NO: 48 - protein, 10 aa, artificial
  4A2, 5B4, 5C5  - CDR-H3
DGSSGWYFQY

SEQ ID NO: 49 - DNA, 15 bp, artificial
  4A9 - CDR-H1
ggttactactggagc

SEQ ID NO: 50 - DNA, 48 bp, artificial
  4A9 - CDR-H2
tatttctcttacagtgggagcaccaactacaacccctccctcaagagt

SEQ ID NO: 51 - DNA, 24 bp, artificial
  4A9 - CDR-H3
aactgggccttccactttgacttc

SEQ ID NO: 52 - protein, 5 aa, artificial
  4A9 - CDR-H1
GYYWS

SEQ ID NO: 53 - protein, 16 aa, artificial
  4A9 - CDR-H2
YFSYSGSTNYNPSLKS

SEQ ID NO: 54 - protein, 8 aa, artificial
  4A9 - CDR-H3
NWAFHFDF

SEQ ID NO: 55 - DNA, 15 bp, artificial
  4B10, 4C2 - CDR-H1
agctatgacatgcac

SEQ ID NO: 56 - DNA, 51 bp, artificial
  4B10, 4C2  - CDR-H2
gttatatcatatgatggaactaatgaatactatgcagactccgtgaagggc

SEQ ID NO: 57 - DNA, 30 bp, artificial
  4B10, 4C2 - CDR-H3
gaacgatattttgactggtcttttgactac

SEQ ID NO: 58 - protein, 5 aa, artificial
  4B10, 4C2 - CDR-H1
SYDMH

SEQ ID NO: 59 - protein, 17 aa, artificial
  4B10, 4C2 - CDR-H2
VISYDGTNEYYADSVKG

SEQ ID NO: 60 - protein, 10 aa, artificial
  4B10, 4C2 - CDR-H3
ERYFDWSFDY

SEQ ID NO: 61 - DNA, 15 bp, artificial
  4D2 - CDR-H1
agttatgacatgcac

SEQ ID NO: 62 - DNA, 51 bp, artificial; identical to SEQ ID NO: 56
  4D2 - CDR-H2

SEQ ID NO: 63 - DNA, 30 bp, artificial; identical to SEQ ID NO: 57
  4D2 - CDR-H3

SEQ ID NO: 64 - protein, 5 aa, artificial
  4D2 - CDR-H1
SYDMH

SEQ ID NO: 65 - protein, 17 aa, artificial
  4D2 - CDR-H2
VISYDGTNEYYADSVKG

SEQ ID NO: 66 - protein, 10 aa, artificial
  4D2 - CDR-H3
ERYFDWSFDY

SEQ ID NO: 67 - DNA, 15 bp, artificial
  4D3, 4F3 - CDR-H1
agctatgacatggac

SEQ ID NO: 68 - DNA, 51 bp, artificial
  4D3, 4F3 - CDR-H2
gttatatggtatgatggaagtaataaatactatgcagactccgtgaggggc

SEQ ID NO: 69 - DNA, 30 bp, artificial
  4D3, 4F3 - CDR-H3
gaaactggggagggctggtacttcgatctc

SEQ ID NO: 70 - protein, 5 aa, artificial
  4D3, 4F3 - CDR-H1
SYDMD

SEQ ID NO: 71 - protein, 17 aa, artificial
  4D3, 4F3 - CDR-H2
VIWYDGSNKYYADSVRG

SEQ ID NO: 72 - protein, 10 aa, artificial
  4D3, 4F3 - CDR-H3
ETGEGWYFDL

SEQ ID NO: 73 - DNA, 15 bp, artificial
  4E10 - CDR-H1
agctatgacatgcac

SEQ ID NO: 74 - DNA, 51 bp, artificial; identical to SEQ ID NO: 2
  4E10 - CDR-H2

SEQ ID NO: 75 - DNA, 30 bp, artificial
  4E10 - CDR-H3
gagtataggtacagctggtactttgactac

SEQ ID NO: 76 - protein, 5 aa, artificial
  4E10 - CDR-H1
SYDMH

SEQ ID NO: 77 - protein, 17 aa, artificial
  4E10 - CDR-H2
VIWYDGSNKYYADSVKG

SEQ ID NO: 78 - protein, 10 aa, artificial
  4E10 - CDR-H3
EYRYSWYFDY

SEQ ID NO: 79 - DNA, 15 bp, artificial
  4F7 - CDR-H1
agttactcctggagc

SEQ ID NO: 80 - DNA, 48 bp, artificial
  4F7 - CDR-H2
tatatctattacagtgggagcaccaactacaacccctccctcaagagt

SEQ ID NO: 81 - DNA, 24 bp, artificial
  4F7 - CDR-H3
aactgggccttccactttgactac

SEQ ID NO: 82 - protein, 5 aa, artificial
  4F7 - CDR-H1
SYSWS

SEQ ID NO: 83 - protein, 16 aa, artificial
  4F7 - CDR-H2
YIYYSGSTNYNPSLKS

SEQ ID NO: 84 - protein, 8 aa, artificial
  4F7 - CDR-H3
NWAFHFDY

SEQ ID NO: 85 - DNA, 15 bp, artificial
  5E3 - CDR-H1
agctatagcatgcac

SEQ ID NO: 86 - DNA, 51 bp, artificial
  5E3 - CDR-H2
tccattagtagtagtagtagttacatatactacgcagactcagtgaagggc

SEQ ID NO: 87 - DNA, 42 bp, artificial
  5E3 - CDR-H3
ggggaaactggaactaactactactactacggtatggacgtc

SEQ ID NO: 88 - protein, 5 aa, artificial
  5E3 - CDR-H1
SYSMH

SEQ ID NO: 89 - protein, 17 aa, artificial
  5E3 - CDR-H2
SISSSSSYIYYADSVKG

SEQ ID NO: 90 - protein, 14 aa, artificial
  5E3 - CDR-H3
GETGTNYYYYGMDV

SEQ ID NO: 91 - DNA, 15 bp, artificial
  17H8, 23B6, 28D10 - CDR-H1
agttactactggagc

SEQ ID NO: 92 - DNA, 48 bp, artificial
  17H8, 23B6, 28D10 - CDR-H2
tatatctattacattgggagcaccaactacaacccctccctcaagagt

SEQ ID NO: 93 - DNA, 42 bp, artificial
  17H8, 23B6, 28D10 - CDR-H3
gattcccggtatagaagtggctggtacgatgcttttgatatc

SEQ ID NO: 94 - protein, 5 aa, artificial
  17H8, 23B6, 28D10 - CDR-H1
SYYWS

SEQ ID NO: 95 - protein, 16 aa, artificial
  17H8, 23B6, 28D10 - CDR-H2
YIYYIGSTNYNPSLKS

SEQ ID NO: 96 - protein, 14 aa, artificial
  17H8, 23B6, 28D10 - CDR-H3
DSRYRSGWYDAFDI

SEQ ID NO: 97 - DNA, 15 bp, artificial
  16C1 - CDR-H1
ggttactactggagc

SEQ ID NO: 98 - DNA, 48 bp, artificial; identical to SEQ ID NO: 92
  16C1 - CDR-H2

SEQ ID NO: 99 - DNA, 36 bp, artificial
  16C1 - CDR-H3
gatgggagcagtggctggtaccggtggttcgacccc

SEQ ID NO: 100 - protein, 5 aa, artificial
  16C1 - CDR-H1
GYYWS

SEQ ID NO: 101 - protein, 16 aa, artificial
  16C1 - CDR-H2
YIYYIGSTNYNPSLKS

SEQ ID NO: 102 - protein, 12 aa, artificial
  16C1 - CDR-H3
DGSSGWYRWFDP

SEQ ID NO: 103 - DNA, 15 bp, artificial
  16A4 - CDR-H1
agttactactggagc

SEQ ID NO: 104 - DNA, 48 bp, artificial
  16A4 - CDR-H2
tatatctattacagtgggagcaccaattacaacccctccctcaagagt

SEQ ID NO: 105 - DNA, 51 bp, artificial
  16A4 - CDR-H3
gatcaaaggcggatagcagcagctggtacccacttctacggtatggacgtc

SEQ ID NO: 106 - protein, 5 aa, artificial
  16A4 - CDR-H1
SYYWS

SEQ ID NO: 107 - protein, 16 aa, artificial
  16A4 - CDR-H2
YIYYSGSTNYNPSLKS

SEQ ID NO: 108 - protein, 17 aa, artificial
  16A4 - CDR-H3
DQRRIAAAGTHFYGMDV

SEQ ID NO: 109 - DNA, 15 bp, artificial
  16E2, 17E10, 20B12 - CDR-H1
agctatggcatgcac

SEQ ID NO: 110 - DNA, 51 bp, artificial
  16E2, 17E10, 20B12 - CDR-H2
gtgatatggtatgatggaagtaataaatactatgcagactccgtgaagggc

SEQ ID NO: 111 - DNA, 27 bp, artificial
  16E2, 17E10, 20B12 - CDR-H3
gacgggtgggagctgtcctttgactac

SEQ ID NO: 112 - protein, 5 aa, artificial
  16E2, 17E10, 20B12 - CDR-H1
SYGMH

SEQ ID NO: 113 - protein, 17 aa, artificial
  16E2, 17E10, 20B12 - CDR-H2
VIWYDGSNKYYADSVKG

SEQ ID NO: 114 - protein, 9 aa, artificial
  16E2, 17E10, 20B12 - CDR-H3
DGWELSFDY

SEQ ID NO: 115 - DNA, 15 bp, artificial
  22G10 - CDR-H1
agttatgccatgaac

SEQ ID NO: 116 - DNA, 51 bp, artificial
  22G10 - CDR-H2
actattagtggtggtggtgctaacacatactacgcagactccgtgaagggc

SEQ ID NO: 117 - DNA, 36 bp, artificial
  22G10 - CDR-H3
gggggaatggggggatactactacggtatggacgtc

SEQ ID NO: 118 - protein, 5 aa, artificial
  22G10 - CDR-H1
SYAMN

SEQ ID NO: 119 - protein, 17 aa, artificial
  22G10 - CDR-H2
TISGGGANTYYADSVKG

SEQ ID NO: 120 - protein, 12 aa, artificial
  22G10 - CDR-H3
GGMGGYYYGMDV

SEQ ID NO: 121 - DNA, 15 bp, artificial
  16H2, 20D3, 23E7  - CDR-H1
agctactttattcac

SEQ ID NO: 122 - DNA, 51 bp, artificial
  16H2, 20D3, 23E7  - CDR-H2
ataatcaaccctattagtgttagcacaagctacgcacagaagttccagggc

SEQ ID NO: 123 - DNA, 33 bp, artificial
  16H2, 20D3, 23E7  - CDR-H3
ggggggatacagctatggttacattttgactac

SEQ ID NO: 124 - protein, 5 aa, artificial
  16H2, 20D3, 23E7  - CDR-H1
SYFIH

SEQ ID NO: 125 - protein, 17 aa, artificial
  16H2, 20D3, 23E7  - CDR-H2
IINPISVSTSYAQKFQG

SEQ ID NO: 126 - protein, 11 aa, artificial
  16H2, 20D3, 23E7  - CDR-H3
GGIQLWLHFDY

SEQ ID NO: 127 - DNA, 15 bp, artificial
  22D1 - CDR-H1
agctactttattcac

SEQ ID NO: 128 - DNA, 51 bp, artificial; identical to SEQ ID NO: 122
  22D1 - CDR-H2

SEQ ID NO: 129 - DNA, 33 bp, artificial
  22D1 - CDR-H3
ggggggatacagctatggttacatttggactac

SEQ ID NO: 130 - protein, 5 aa, artificial
  22D1 - CDR-H1
SYFIH

SEQ ID NO: 131 - protein, 17 aa, artificial
  22D1 - CDR-H2
IINPISVSTSYAQKFQG

SEQ ID NO: 132 - protein, 11 aa, artificial
  22D1 - CDR-H3
GGIQLWLHLDY

SEQ ID NO: 133 - DNA, 15 bp, artificial
  25F8 - CDR-H1
agctactatattcac

SEQ ID NO: 134 - DNA, 51 bp, artificial
  25F8 - CDR-H2
ataatcaaccccagtggtggtagcacaaggtacgcacagaagttccagggc

SEQ ID NO: 135 - DNA, 33 bp, artificial
  25F8 - CDR-H3
gggggaatacagctatggttacattttgactac

SEQ ID NO: 136 - protein, 5 aa, artificial
  25F8 - CDR-H1
SYYIH

SEQ ID NO: 137 - protein, 17 aa, artificial
  25F8 - CDR-H2
IINPSGGSTRYAQKFQG

SEQ ID NO: 138 - protein, 11 aa, artificial
  25F8 - CDR-H3
GGIQLWLHFDY

SEQ ID NO: 139 - DNA, 15 bp, artificial
  26F12, 27B3 - CDR-H1
aactactatatgtcc

SEQ ID NO: 140 - DNA, 51 bp, artificial
  26F12, 27B3  - CDR-H2
ataatcaaccctagtggtggtgactcaacctacgcacagaagttccagggc

SEQ ID NO: 141 - DNA, 33 bp, artificial
  26F12, 27B3 - CDR-H3
ggggggatacaactatggttacattttgactac

SEQ ID NO: 142 - protein, 5 aa, artificial
  26F12, 27B3 - CDR-H1
NYYMS

SEQ ID NO: 143 - protein, 17 aa, artificial
  26F12, 27B3 - CDR-H2
IINPSGGDSTYAQKFQG

SEQ ID NO: 144 - protein, 11 aa, artificial
  26F12, 27B3 - CDR-H3
GGIQLWLHFDY

SEQ ID NO: 145 - DNA, 15 bp, artificial
  26D1 - CDR-H1
agctactatatgtcc

SEQ ID NO: 146 - DNA, 51 bp, artificial
  26D1 - CDR-H2
ataatccaccctagtggtggtgacacaacctacgcacagaagttccagggc

SEQ ID NO: 147 - DNA, 33 bp, artificial
  26D1 - CDR-H3
ggggggataaaactatggttacattttgactat

SEQ ID NO: 148 - protein, 5 aa, artificial
  26D1 - CDR-H1
SYYMS

SEQ ID NO: 149 - protein, 17 aa, artificial
  26D1 - CDR-H2
IIHPSGGDTTYAQKFQG

SEQ ID NO: 150 - protein, 11 aa, artificial
  26D1 - CDR-H3
GGIKLWLHFDY

SEQ ID NO: 151 - DNA, 15 bp, artificial
  25G10 - CDR-H1
ggttactactggagc

SEQ ID NO: 152 - DNA, 48 bp, artificial; identical to SEQ ID NO: 92
  25G10  CDR-H2

SEQ ID NO: 153 - DNA, 36 bp, artificial; identical to SEQ ID NO: 99
  25G10 - CDR-H3

SEQ ID NO: 154 - protein, 5 aa, artificial
  25G10 - CDR-H1
GYYWS

SEQ ID NO: 155 - protein, 16 aa, artificial
  25G10 - CDR-H2
YIYYIGSTNYNPSLKS

SEQ ID NO: 156 - protein, 12 aa, artificial
  25G10 - CDR-H3
DGSSGWYRWFDP

SEQ ID NO: 157 - DNA, 15 bp, artificial
  23A10 - CDR-H1
cgctatggcatacac

SEQ ID NO: 158 - DNA, 51 bp, artificial; identical to SEQ ID NO: 2
  23A10 - CDR-H2

SEQ ID NO: 159 - DNA, 48 bp, artificial
  23A10 - CDR-H3
agggccggtatacctggaactacgggctactactatggtatggacgtc

SEQ ID NO: 160 - protein, 5 aa, artificial
  23A10 - CDR-H1
RYGIH

SEQ ID NO: 161 - protein, 17 aa, artificial
  23A10 - CDR-H2
VIWYDGSNKYYADSVKG

SEQ ID NO: 162 - protein, 16 aa, artificial
  23A10 - CDR-H3
RAGIPGTTGYYYGMDV

SEQ ID NO: 163 - DNA, 15 bp, artificial
  19B5 - CDR-H1
agctactttattcac

SEQ ID NO: 164 - DNA, 51 bp, artificial
  19B5 - CDR-H2
attatcaaccctattagtgttagcacaagctacgcacagaagttccagggc

SEQ ID NO: 165 - DNA, 33 bp, artificial; identical to SEQ ID NO: 129
  19B5 - CDR-H3

SEQ ID NO: 166 - protein, 5 aa, artificial
  19B5 - CDR-H1
SYFIH

SEQ ID NO: 167 - protein, 17 aa, artificial
  19B5 - CDR-H2
IINPISVSTSYAQKFQG

SEQ ID NO: 168 - protein, 11 aa, artificial
  19B5 - CDR-H3
GGIQLWLHLDY

SEQ ID NO: 169 - DNA, 33 bp, artificial
  1D10, 2C12  - CDR-L1
tctggagatagattgggggaaaaatatacttgc

SEQ ID NO: 170 - DNA, 21 bp, artificial
  1D10, 2C12 - CDR-L2
caagataccaagcggccctca

SEQ ID NO: 171 - DNA, 27 bp, artificial
  1D10, 2C12 - CDR-L3
caggcgtgggacagcagcactgtggta

SEQ ID NO: 172 - protein, 11 aa, artificial
  1D10, 2C12 - CDR-L1
SGDRLGEKYTC

SEQ ID NO: 173 - protein, 7 aa, artificial
  1D10, 2C12 - CDR-L2
QDTKRPS

SEQ ID NO: 174 - protein, 9 aa, artificial
  1D10, 2C12 - CDR-L3
QAWDSSTVV

SEQ ID NO: 175 - DNA, 36 bp, artificial
  1F10 - CDR-L1
agggccagtcggagtattagcagcagctacttagcc

SEQ ID NO: 176 - DNA, 21 bp, artificial
  1F10 - CDR-L2
ggtccatccagcagggccact

SEQ ID NO: 177 - DNA, 24 bp, artificial
  1F10 - CDR-L3
cagcagtatggtagctcattcact

SEQ ID NO: 178 - protein, 12 aa, artificial
  1F10 - CDR-L1
RASRSISSSYLA

SEQ ID NO: 179 - protein, 7 aa, artificial
  1F10 - CDR-L2
GPSSRAT

SEQ ID NO: 180 - protein, 8 aa, artificial
  1F10 - CDR-L3
QQYGSSFT

SEQ ID NO: 181 - DNA, 48 bp, artificial
  2C12_LC#1 - CDR-L1
aggtctagtcaaagcctcgtatacagtgatggaaacacctacttgaat

SEQ ID NO: 182 - DNA, 21 bp, artificial
  2C12_LC#1 - CDR-L2
aaggtttctaactgggactct

SEQ ID NO: 183 - DNA, 27 bp, artificial
  2C12_LC#1 - CDR-L3
atgcaaggtatagtgtggccgtgcagt

SEQ ID NO: 184 - protein, 16 aa, artificial
  2C12_LC#1 - CDR-L1
RSSQSLVYSDGNTYLN

SEQ ID NO: 185 - protein, 7 aa, artificial
  2C12_LC#1 - CDR-L2
KVSNWDS

SEQ ID NO: 186 - protein, 9 aa, artificial
  2C12_LC#1 - CDR-L3
MQGIVWPCS

SEQ ID NO: 187 - DNA, 48 bp, artificial; identical to SEQ ID NO: 181
  2G6_LC#1 - CDR-L1

SEQ ID NO: 188 - DNA, 21 bp, artificial
  2G6_LC#1 - CDR-L2
caggtttctaactgggactct

SEQ ID NO: 189 - DNA, 27 bp, artificial
  2G6_LC#1 - CDR-L3
atgcaagatacactgtggccgtgcagt

SEQ ID NO: 190 - protein, 16 aa, artificial
  2G6_LC#1 - CDR-L1
RSSQSLVYSDGNTYLN

SEQ ID NO: 191 - protein, 7 aa, artificial
  2G6_LC#1 - CDR-L2
QVSNWDS

SEQ ID NO: 192 - protein, 9 aa, artificial
  2G6_LC#1 - CDR-L3
MQDTLWPCS

SEQ ID NO: 193 - DNA, 33 bp, artificial
  2G6 - CDR-L1
tctggagataggttgggggaaaaatatacttgc

SEQ ID NO: 194 - DNA, 21 bp, artificial
  2G6 - CDR-L2
caagataccaagcggccctca

SEQ ID NO: 195 - DNA, 27 bp, artificial
  2G6 - CDR-L3
caggcgtgggacagcagcactgtggta

SEQ ID NO: 196 - protein, 11 aa, artificial
  2G6 - CDR-L1
SGDRLGEKYTC

SEQ ID NO: 197 - protein, 7 aa, artificial
  2G6 - CDR-L2
QDTKRPS

SEQ ID NO: 198 - protein, 9 aa, artificial
  2G6 - CDR-L3
QAWDSSTVV

SEQ ID NO: 199 - DNA, 33 bp, artificial; identical to SEQ ID NO: 169
  2H12 - CDR-L1

SEQ ID NO: 200 - DNA, 21 bp, artificial
  2H12 - CDR-L2
caagataccaagcggccctca

SEQ ID NO: 201 - DNA, 27 bp, artificial
  2H12 - CDR-L3
caggcgtgggacagcagcactgtggta

SEQ ID NO: 202 - protein, 11 aa, artificial
  2H12 - CDR-L1
SGDRLGEKYTC

SEQ ID NO: 203 - protein, 7 aa, artificial
  2H12 - CDR-L2
QDTKRPS

SEQ ID NO: 204 - protein, 9 aa, artificial
  2H12 - CDR-L3
QAWDSSTVV

SEQ ID NO: 205 - DNA, 48 bp, artificial; identical to SEQ ID NO: 181
  2H12_LC#2 - CDR-L1

SEQ ID NO: 206 - DNA, 21 bp, artificial
  2H12_LC#2 - CDR-L2
aaggtttctaactgggactct

SEQ ID NO: 207 - DNA, 27 bp, artificial
  2H12_LC#2 - CDR-L3
atgcaagatacactgtggccgtgcagt

SEQ ID NO: 208 - protein, 16 aa, artificial
  2H12_LC#2 - CDR-L1
RSSQSLVYSDGNTYLN

SEQ ID NO: 209 - protein, 7 aa, artificial
  2H12_LC#2 - CDR-L2
KVSNWDS

SEQ ID NO: 210 - protein, 9 aa, artificial
  2H12_LC#2 - CDR-L3
MQDTLWPCS

SEQ ID NO: 211 - DNA, 36 bp, artificial
  4A2, 5B4, 5C5  - CDR-L1
agggccagtcggaatattagcagcagctacttagcc

SEQ ID NO: 212 - DNA, 21 bp, artificial
  4A2, 5B4, 5C5  - CDR-L2
ggtccatccagcagggccact

SEQ ID NO: 213 - DNA, 24 bp, artificial
  4A2, 5B4, 5C5  - CDR-L3
cagcagtatggtagctcattcact

SEQ ID NO: 214 - protein, 12 aa, artificial
  4A2, 5B4, 5C5  - CDR-L1
RASRNISSSYLA

SEQ ID NO: 215 - protein, 7 aa, artificial
  4A2, 5B4, 5C5  - CDR-L2
GPSSRAT

SEQ ID NO: 216 - protein, 8 aa, artificial
  4A2, 5B4, 5C5  - CDR-L3
QQYGSSFT

SEQ ID NO: 217 - DNA, 42 bp, artificial
  4A9 - CDR-L1
actgggagcagctccaacatcgggacaggttatgctgtacac

SEQ ID NO: 218 - DNA, 21 bp, artificial
  4A9 - CDR-L2
ggtaacaacaatcggccctca

SEQ ID NO: 219 - DNA, 33 bp, artificial
  4A9 - CDR-L3
cagtcctatgacagcagactgagtggttgggtg

SEQ ID NO: 220 - protein, 14 aa, artificial
  4A9 - CDR-L1
TGSSSNIGTGYAVH

SEQ ID NO: 221 - protein, 7 aa, artificial
  4A9 - CDR-L2
GNNNRPS

SEQ ID NO: 222 - protein, 11 aa, artificial
  4A9 - CDR-L3
QSYDSRLSGWV

SEQ ID NO: 223 - DNA, 36 bp, artificial
  4B10, 4C2 - CDR-L1
agggccagtcagagtgttagcaacacctacttagcc

SEQ ID NO: 224 - DNA, 21 bp, artificial
  4B10, 4C2 - CDR-L2
ggtgcatccagcagggccact

SEQ ID NO: 225 - DNA, 24 bp, artificial
  4B10, 4C2 - CDR-L3
cagcagtacagtaactcgtggacg

SEQ ID NO: 226 - protein, 12 aa, artificial
  4B10, 4C2 - CDR-L1
RASQSVSNTYLA

SEQ ID NO: 227 - protein, 7 aa, artificial
  4B10, 4C2 - CDR-L2
GASSRAT

SEQ ID NO: 228 - protein, 8 aa, artificial
  4B10, 4C2 - CDR-L3
QQYSNSWT

SEQ ID NO: 229 - DNA, 36 bp, artificial; identical to SEQ ID NO: 223
  4D2 - CDR-L1

SEQ ID NO: 230 - DNA, 21 bp, artificial
  4D2 - CDR-L2
ggtgcatccagcagggccgct

SEQ ID NO: 231 - DNA, 24 bp, artificial
  4D2 - CDR-L3
cagcagtatagtaactcgtggacg

SEQ ID NO: 232 - protein, 12 aa, artificial
  4D2 - CDR-L1
RASQSVSNTYLA

SEQ ID NO: 233 - protein, 7 aa, artificial
  4D2 - CDR-L2
GASSRAA

SEQ ID NO: 234 - protein, 8 aa, artificial
  4D2 - CDR-L3
QQYSNSWT

SEQ ID NO: 235 - DNA, 36 bp, artificial
  4D3, 4F3 - CDR-L1
agggccagtcagagtgttagcagcagctacttagcc

SEQ ID NO: 236 - DNA, 21 bp, artificial
  4D3, 4F3 - CDR-L2
ggtgcatccagcagggccact

SEQ ID NO: 237 - DNA, 24 bp, artificial
  4D3, 4F3 - CDR-L3
cagcagtatggtagctcgtggacg

SEQ ID NO: 238 - protein, 12 aa, artificial
  4D3, 4F3 - CDR-L1
RASQSVSSSYLA

SEQ ID NO: 239 - protein, 7 aa, artificial
  4D3, 4F3 - CDR-L2
GASSRAT

SEQ ID NO: 240 - protein, 8 aa, artificial
  4D3, 4F3 - CDR-L3
QQYGSSWT

SEQ ID NO: 241 - DNA, 36 bp, artificial
  4E10 - CDR-L1
agggccagtcagagtgttggcagcagctacttagcc

SEQ ID NO: 242 - DNA, 21 bp, artificial
  4E10 - CDR-L2
ggtgcatccagcagggtcact

SEQ ID NO: 243 - DNA, 24 bp, artificial
  4E10 - CDR-L3
cagcaatatagtaactcgtggacg

SEQ ID NO: 244 - protein, 12 aa, artificial
  4E10 - CDR-L1
RASQSVGSSYLA

SEQ ID NO: 245 - protein, 7 aa, artificial
  4E10 - CDR-L2
GASSRVT

SEQ ID NO: 246 - protein, 8 aa, artificial
  4E10 - CDR-L3
QQYSNSWT

SEQ ID NO: 247 - DNA, 42 bp, artificial
  4F7 - CDR-L1
actgggagcagctccaatatcgggacaggttatgatgtacac

SEQ ID NO: 248 - DNA, 21 bp, artificial
  4F7 - CDR-L2
ggtaacagcaatcggccctca

SEQ ID NO: 249 - protein, 33 aa, artificial
  4F7 - CDR-L3
CAGTCCTATGACAGCAGTCTGAGTGGTTGGGTG

SEQ ID NO: 250 - protein, 14 aa, artificial
  4F7 - CDR-L1
TGSSSNIGTGYDVH

SEQ ID NO: 251 - protein, 7 aa, artificial
  4F7 - CDR-L2
GNSNRPS

SEQ ID NO: 252 - protein, 11 aa, artificial
  4F7 - CDR-L3
QSYDSSLSGWV

SEQ ID NO: 253 - DNA, 33 bp, artificial
  5E3 - CDR-L1
tctggagataaattgggggatgaatatgcttgc

SEQ ID NO: 254 - DNA, 21 bp, artificial
  5E3 - CDR-L2
caagatagcaagcggccctca

SEQ ID NO: 255 - DNA, 27 bp, artificial
  5E3 - CDR-L3
caggcgtgggacagcagcactgtggta

SEQ ID NO: 256 - protein, 11 aa, artificial
  5E3 - CDR-L1
SGDKLGDEYAC

SEQ ID NO: 257 - protein, 7 aa, artificial
  5E3 - CDR-L2
QDSKRPS

SEQ ID NO: 258 - protein, 9 aa, artificial
  5E3 - CDR-L3
QAWDSSTVV

SEQ ID NO: 259 - DNA, 36 bp, artificial
  17H8, 23B6, 28D10 - CDR-L1
agggccagtcagagtgttgccggcagctacctagcc

SEQ ID NO: 260 - DNA, 21 bp, artificial
  17H8, 23B6, 28D10 - CDR-L2
ggtgcatccagcagggccact

SEQ ID NO: 261 - DNA, 27 bp, artificial
  17H8, 23B6, 28D10 - CDR-L3
cagcagtatggtaaatcaccgatcacc

SEQ ID NO: 262 - protein, 12 aa, artificial
  17H8, 23B6, 28D10 - CDR-L1
RASQSVAGSYLA

SEQ ID NO: 263 - protein, 7 aa, artificial
  17H8, 23B6, 28D10 - CDR-L2
GASSRAT

SEQ ID NO: 264 - protein, 9 aa, artificial
  17H8, 23B6, 28D10 - CDR-L3
QQYGKSPIT

SEQ ID NO: 265 - DNA, 36 bp, artificial
  16C1 - CDR-L1
agggccagccagagtgttagcagcagctacttagcc

SEQ ID NO: 266 - DNA, 21 bp, artificial
  16C1 - CDR-L2
ggtgcatccagcagggccact

SEQ ID NO: 267 - DNA, 27 bp, artificial
  16C1 - CDR-L3
cagcagtatggtaactcaccgctcact

SEQ ID NO: 268 - protein, 12 aa, artificial
  16C1 - CDR-L1
RASQSVSSSYLA

SEQ ID NO: 269 - protein, 7 aa, artificial
  16C1 - CDR-L2
GASSRAT

SEQ ID NO: 270 - protein, 9 aa, artificial
  16C1 - CDR-L3
QQYGNSPLT

SEQ ID NO: 271 - DNA, 36 bp, artificial
  16A4 - CDR-L1
agggccagtcagagtgttagcagcagttatttagcc

SEQ ID NO: 272 - DNA, 21 bp, artificial
  16A4 - CDR-L2
ggtacatccagcagggccact

SEQ ID NO: 273 - DNA, 27 bp, artificial
  16A4 - CDR-L3
cagcagtacggtagctcacctttcact

SEQ ID NO: 274 - protein, 12 aa, artificial
  16A4 - CDR-L1
RASQSVSSSYLA

SEQ ID NO: 275 - protein, 7 aa, artificial
  16A4 - CDR-L2
GTSSRAT

SEQ ID NO: 276 - protein, 9 aa, artificial
  16A4 - CDR-L3
QQYGSSPFT

SEQ ID NO: 277 - DNA, 33 bp, artificial
  16E2, 17E10, 20B12  - CDR-L1
cgggcgagtcagggcattagcaattatttagcc

SEQ ID NO: 278 - DNA, 21 bp, artificial
  16E2, 17E10, 20B12  - CDR-L2
gctgcatccagtttgcaaagt

SEQ ID NO: 279 - DNA, 27 bp, artificial
  16E2, 17E10, 20B12  - CDR-L3
caacactattttacttaccctcggacg

SEQ ID NO: 280 - protein, 11 aa, artificial
  16E2, 17E10, 20B12  - CDR-L1
RASQGISNYLA

SEQ ID NO: 281 - protein, 7 aa, artificial
  16E2, 17E10, 20B12  - CDR-L2
AASSLQS

SEQ ID NO: 282 - protein, 9 aa, artificial
  16E2, 17E10, 20B12  - CDR-L3
QHYFTYPRT

SEQ ID NO: 283 - DNA, 33 bp, artificial
  22G10 - CDR-L1
agggccagtcagagtattagcagcaacttagcc

SEQ ID NO: 284 - DNA, 21 bp, artificial
  22G10 - CDR-L2
ggtgcatttaccagggccact

SEQ ID NO: 285 - DNA, 27 bp, artificial
  22G10 - CDR-L3
cagcagtataattactggccgctcact

SEQ ID NO: 286 - protein, 11 aa, artificial
  22G10 - CDR-L1
RASQSISSNLA

SEQ ID NO: 287 - protein, 7 aa, artificial
  22G10 - CDR-L2
GAFTRAT

SEQ ID NO: 288 - protein, 9 aa, artificial
  22G10 - CDR-L3
QQYNYWPLT

SEQ ID NO: 289 - DNA, 39 bp, artificial
  16H2, 20D3, 23E7 - CDR-L1
tctggaagcagctccaacatcggaagtaattttgtaaac

SEQ ID NO: 290 - DNA, 21 bp, artificial
  16H2, 20D3, 23E7 - CDR-L2
actaataatcagcggccctca

SEQ ID NO: 291 - DNA, 33 bp, artificial
  16H2, 20D3, 23E7 - CDR-L3
gcaacatgggatgacagcctgaatggttgggtg

SEQ ID NO: 292 - protein, 13 aa, artificial
  16H2, 20D3, 23E7 - CDR-L1
SGSSSNIGSNFVN

SEQ ID NO: 293 - protein, 7 aa, artificial
  16H2, 20D3, 23E7 - CDR-L2
TNNQRPS

SEQ ID NO: 294 - protein, 11 aa, artificial
  16H2, 20D3, 23E7 - CDR-L3
ATWDDSLNGWV

SEQ ID NO: 295 - DNA, 39 bp, artificial
  22D1 - CDR-L1
tctggaagcagctccaacatcggaagcaattttgtaaac

SEQ ID NO: 296 - DNA, 21 bp, artificial
  22D1 - CDR-L2
actaataatcagcggccctca

SEQ ID NO: 297 - DNA, 33 bp, artificial
  22D1 - CDR-L3
gcaacatgggatgacagtatgaatggttgggtg

SEQ ID NO: 298 - protein, 13 aa, artificial
  22D1 - CDR-L1
SGSSSNIGSNFVN

SEQ ID NO: 299 - protein, 7 aa, artificial
  22D1 - CDR-L2
TNNQRPS

SEQ ID NO: 300 - protein, 11 aa, artificial
  22D1 - CDR-L3
ATWDDSMNGWV

SEQ ID NO: 301 - DNA, 39 bp, artificial
  25F8 - CDR-L1
tctggaagcagctccaacatcggaaggaattttgtaaac

SEQ ID NO: 302 - DNA, 21 bp, artificial
  25F8 - CDR-L2
actaataatcagcggccctca

SEQ ID NO: 303 - DNA, 33 bp, artificial
  25F8 - CDR-L3
gcagcatgggatgacagcctgaatggttgggtg

SEQ ID NO: 304 - protein, 13 aa, artificial
  25F8 - CDR-L1
SGSSSNIGRNFVN

SEQ ID NO: 305 - protein, 7 aa, artificial
  25F8 - CDR-L2
TNNQRPS

SEQ ID NO: 306 - protein, 11 aa, artificial
  25F8 - CDR-L3
AAWDDSLNGWV

SEQ ID NO: 307 - DNA, 39 bp, artificial
  26F12, 27B3 - CDR-L1
tctggaagccgctccaacatcggaagtaattttgtaaac

SEQ ID NO: 308 - DNA, 21 bp, artificial
  26F12, 27B3 - CDR-L2
actaattatcagcggccctca

SEQ ID NO: 309 - DNA, 33 bp, artificial
  26F12, 27B3 - CDR-L3
gcagtatgggatgacagcctgaatggttgggtg

SEQ ID NO: 310 - protein, 13 aa, artificial
  26F12, 27B3 - CDR-L1
SGSRSNIGSNFVN

SEQ ID NO: 311 - protein, 7 aa, artificial
  26F12, 27B3 - CDR-L2
TNYQRPS

SEQ ID NO: 312 - protein, 11 aa, artificial
  26F12, 27B3 - CDR-L3
AVWDDSLNGWV

SEQ ID NO: 313 - DNA, 39 bp, artificial; identical to SEQ ID NO: 307
  26D1 - CDR-L1

SEQ ID NO: 314 - DNA, 21 bp, artificial
  26D1 - CDR-L2
actaataatcagcggccctca

SEQ ID NO: 315 - DNA, 33 bp, artificial; identical to SEQ ID NO: 309
  26D1 - CDR-L3

SEQ ID NO: 316 - protein, 13 aa, artificial
  26D1 - CDR-L1
SGSRSNIGSNFVN

SEQ ID NO: 317 - protein, 7 aa, artificial
  26D1 - CDR-L2
TNNQRPS

SEQ ID NO: 318 - protein, 11 aa, artificial
  26D1 - CDR-L3
AVWDDSLNGWV

SEQ ID NO: 319 - DNA, 36 bp, artificial; identical to SEQ ID NO: 235
  25G10 - CDR-L1

SEQ ID NO: 320 - DNA, 21 bp, artificial
  25G10 - CDR-L2
ggtgcatccagcagggccact

SEQ ID NO: 321 - DNA, 27 bp, artificial
  25G10 - CDR-L3
cagcagtatggtaactcaccgctcact

SEQ ID NO: 322 - protein, 12 aa, artificial
  25G10 - CDR-L1
RASQSVSSSYLA

SEQ ID NO: 323 - protein, 7 aa, artificial
  25G10 - CDR-L2
GASSRAT

SEQ ID NO: 324 - protein, 9 aa, artificial
  25G10 - CDR-L3
QQYGNSPLT

SEQ ID NO: 325 - DNA, 33 bp, artificial
  23A10 - CDR-L1
tctggagatagattgggggagaaatatgtttgc

SEQ ID NO: 326 - DNA, 21 bp, artificial
  23A10 - CDR-L2
caagataataagtggccctca

SEQ ID NO: 327 - DNA, 27 bp, artificial
  23A10 - CDR-L3
caggcgtgggacagcagcactgtggta

SEQ ID NO: 328 - protein, 11 aa, artificial
  23A10 - CDR-L1
SGDRLGEKYVC

SEQ ID NO: 329 - protein, 7 aa, artificial
  23A10 - CDR-L2
QDNKWPS

SEQ ID NO: 330 - protein, 9 aa, artificial
  23A10 - CDR-L3
QAWDSSTVV

SEQ ID NO: 331 - DNA, 39 bp, artificial
  19B5 - CDR-L1
tctggaagcaggtccaacatcggaagcaattttgtaaac

SEQ ID NO: 332 - DNA, 21 bp, artificial
  19B5 - CDR-L2
actaataatcagcggccctca

SEQ ID NO: 333 - DNA, 33 bp, artificial; identical to SEQ ID NO: 297
  19B5 - CDR-L3

SEQ ID NO: 334 - protein, 13 aa, artificial
  19B5 - CDR-L1
SGSRSNIGSNFVN

SEQ ID NO: 335 - protein, 7 aa, artificial
  19B5 - CDR-L2
TNNQRPS

SEQ ID NO: 336 - protein, 11 aa, artificial
  19B5 - CDR-L3
ATWDDSMNGWV

SEQ ID NO: 337 - DNA, 366 bp, artificial
  17H8, 23B6, 28D10 - HCVR
caggtgcagctgcaggagtcgggcccaggactggtgaagccttcggagaccctgtccctcacgtgcactgtctctggtggctccatcaatagttactactggagctggatccggcagcccccagggaagggactggagtggattgggtatatctattacattgggagcaccaactacaacccctccctcaagagtcgcgtcaccatatcagtagacacgtccaagaaccagttctccctgaagctgagctctgtgaccgctgcggacacggccctgtattactgtgcgagagattcccggtatagaagtggctggtacgatgcttttgatatctggggccaagggacaatggtcaccgtctcttca

SEQ ID NO: 338 - protein, 122 aa, artificial
  17H8, 23B6, 28D10 - HCVR
QVQLQESGPGLVKPSETLSLTCTVSGGSINSYYWSWIRQPPGKGLEWIGYIYYIGSTNYNPSLKSRVTISVDTSKNQFSLKLSSVTAADTALYYCARDSRYRSGWYDAFDIWGQGTMVTVSS

SEQ ID NO: 339 - DNA, 360 bp, artificial
  4A2, 5B4, 5C5  - HCVR
caggtgcagctgcaggagtcgggcccaggactggtgaagccttcacagaccctgtccctcacctgcactgtctctggtggctccatcagcagtagtggttactactggagctggatccgccagcacccagggaagggcctggagtggattgggtacatctattacactgggagcgcctactacaacccgtccctcaagagtcgagttaccatatcagtagacacgtctaagaaccagttctccctgaagctgagctctgtgactgccgcggacacggccgtgtattactgtgcgagagatggaagcagtggctggtacttccagtattggggccagggcaccctggtcaccgtctcctca

SEQ ID NO: 340 - protein, 120 aa, artificial
  4A2, 5B4, 5C5  - HCVR
QVQLQESGPGLVKPSQTLSLTCTVSGGSISSSGYYWSWIRQHPGKGLEWIGYIYYTGSAYYNPSLKSRVTISVDTSKNQFSLKLSSVTAADTAVYYCARDGSSGWYFQYWGQGTLVTVSS

SEQ ID NO: 341 - DNA, 360 bp, artificial
  16H2, 20D3, 23E7  - HCVR
caggtgcagctggtgcagtctggggctgaggtgaagaagcctggggcctcagtgaaggtttcctgcaaggtttctggatacaccttcaccagctactttattcactgggtgcgccaggcccctggacaagggcttgagtggatgggaataatcaaccctattagtgttagcacaagctacgcacagaagttccagggcagagtcaccatgaccagggacacgtccacgagcacagtcttcatggagctgagcagcctgagatctgaggacacggccgtgtattactgtgcgcgaggggggatacagctatggttacattttgactactggggccagggaaccctggtcaccgtctcctca

SEQ ID NO: 342 - protein, 120 aa, artificial
  16H2, 20D3, 23E7  - HCVR
QVQLVQSGAEVKKPGASVKVSCKVSGYTFTSYFIHWVRQAPGQGLEWMGIINPISVSTSYAQKFQGRVTMTRDTSTSTVFMELSSLRSEDTAVYYCARGGIQLWLHFDYWGQGTLVTVSS

SEQ ID NO: 343 - DNA, 360 bp, artificial
  26F12, 27B3 - HCVR
caggtgcagttggtgcagtctggggctgaggtgaagaagcctggggcctcagtgaaggtttcctgcaaggcatctagatacaccttcaccaactactatatgtcctgggtgcgacaggcccctggacaagggcttgagtggatgggaataatcaaccctagtggtggtgactcaacctacgcacagaagttccagggcagactcaccatgaccggggacacgtccacgagcacagtctacatggagctgagcagcctgagatctgaggacacggccgtgtattactgtgcgagaggggggatacaactatggttacattttgactactggggccagggaaccctggtcaccgtctcctca

SEQ ID NO: 344 - protein, 120 aa, artificial
  26F12, 27B3 - HCVR
QVQLVQSGAEVKKPGASVKVSCKASRYTFTNYYMSWVRQAPGQGLEWMGIINPSGGDSTYAQKFQGRLTMTGDTSTSTVYMELSSLRSEDTAVYYCARGGIQLWLHFDYWGQGTLVTVSS

SEQ ID NO: 345 - DNA, 357 bp, artificial
  4B10, 4C2 - HCVR
caggtgcagttggtggagtctgggggaggcgtggtccagcctgggaggtccctgagactctcctgtgcagcctctggattcaccttcagtagctatgacatgcactgggtccgccaggctccaggcaaggggctggagtgggtggcagttatatcatatgatggaactaatgaatactatgcagactccgtgaagggccgattcaccatctccagagacacttccaagaacacgctgtatttgcaaatgaacagcctgagagctgaggacacggctgtatattactgtgcgagagaacgatattttgactggtcttttgactactggggccagggaaccctggtcagtgtctcctca

SEQ ID NO: 346 - protein, 119 aa, artificial
  4B10, 4C2 - HCVR
QVQLVESGGGVVQPGRSLRLSCAASGFTFSSYDMHWVRQAPGKGLEWVAVISYDGTNEYYADSVKGRFTISRDTSKNTLYLQMNSLRAEDTAVYYCARERYFDWSFDYWGQGTLVSVSS

SEQ ID NO: 347 - DNA, 357 bp, artificial
  4D3, 4F3 - HCVR
caggtgcagctggtggagtctgggggaggcgtggtccagcctgggaggtccctgagactctcctgtgcagcgtctggattctccttcagtagctatgacatggactgggtccgccagactccaggcaaggggctggagtgggtggcagttatatggtatgatggaagtaataaatactatgcagactccgtgaggggccgattcaccatctccagagacaattccaagaacacgctgtttctgcaaatgaacagcctgagagtcgaggacacggctgtgtattactgtgcgagagaaactggggagggctggtacttcgatctctggggccgtggcaccctggtcactgtctcctca

SEQ ID NO: 348 - protein, 119 aa, artificial
  4D3, 4F3 - HCVR
QVQLVESGGGVVQPGRSLRLSCAASGFSFSSYDMDWVRQTPGKGLEWVAVIWYDGSNKYYADSVRGRFTISRDNSKNTLFLQMNSLRVEDTAVYYCARETGEGWYFDLWGRGTLVTVSS

SEQ ID NO: 349 - DNA, 354 bp, artificial
  16E2, 17E10, 20B12  - HCVR
caggtgcagctggtggagtctgggggaggcgtggtccagcctgggaggtccctgagactctcctgtgcagcgtctggattcatcttcagtagctatggcatgcactgggtccgccagactccaggcaaggggctggagtgggtggcagtgatatggtatgatggaagtaataaatactatgcagactccgtgaagggccgattcaccatctccagagacatttccaagaacacgctgtatctgcaaatgaacagcctgagagtcgaggacacggctgtgtattactgtgcgagagacgggtgggagctgtcctttgactactggggccagggaaccctggtcaccgtctcctca

SEQ ID NO: 350 - protein, 118 aa, artificial
  16E2, 17E10, 20B12  - HCVR
QVQLVESGGGVVQPGRSLRLSCAASGFIFSSYGMHWVRQTPGKGLEWVAVIWYDGSNKYYADSVKGRFTISRDISKNTLYLQMNSLRVEDTAVYYCARDGWELSFDYWGQGTLVTVSS

SEQ ID NO: 351 - DNA, 375 bp, artificial
  1D10, 2C12 - HCVR
caggtgcagctggtggagtctgggggaggcgtggtccagcctgggaggtccctgagactctcctgtgcagcgtctggattcaccttcagtagctatggcatgcactgggtccgccaggctccaggcaaggggctggagtgggtgtcagttatatggtatgatggaagtaataaatactatgcagactccgtgaagggccgattcaccatctccagagacaattccaagaacacgctgtatctgcaaatgaatagcctgagagctgaggacacggctgtgtattactgcgcgagaagggccggtataataggaactacaggctactactacggtatggacgtctggggccaagggaccacggtcaccgtctcctca

SEQ ID NO: 352 - protein, 125 aa, artificial
  1D10, 2C12 - HCVR
QVQLVESGGGVVQPGRSLRLSCAASGFTFSSYGMHWVRQAPGKGLEWVSVIWYDGSNKYYADSVKGRFTISRDNSKNTLYLQMNSLRAEDTAVYYCARRAGIIGTTGYYYGMDVWGQGTTVTVSS

SEQ ID NO: 353 - DNA, 360 bp, artificial
  16C1 - HCVR
caggtgcagctgcaggagtcgggcccaggactggtgaagccttcggagaccctgtccctcacttgtactgtctctggtggctccatcagtggttactactggagctggatccggcagcccccagggaagggactggagtggattgggtatatctattacattgggagcaccaactacaacccctccctcaagagtcgagtcaccatgtcaatagacacgtccaagaaccagttctccctgacgctgagctctttgaccgctgcggacacggccgtgtatttctgtgcgagagatgggagcagtggctggtaccggtggttcgacccctggggccagggaaccctggtcaccgtctcctca

SEQ ID NO: 354 - protein, 120 aa, artificial
  16C1 - HCVR
QVQLQESGPGLVKPSETLSLTCTVSGGSISGYYWSWIRQPPGKGLEWIGYIYYIGSTNYNPSLKSRVTMSIDTSKNQFSLTLSSLTAADTAVYFCARDGSSGWYRWFDPWGQGTLVTVSS

SEQ ID NO: 355 - DNA, 360 bp, artificial
  25G10 - HCVR
caggtgcagctgcaggagtcgggcccaggactggtgaagccttcggagaccctgtccctcacctgcactgtctctggtggctccatcagtggttactactggagctggatccggcagcccccagggaagggactggagtggattgggtatatctattacattgggagcaccaactacaacccctccctcaagagtcgagtcaccatgtcagtagacacgtccaagaaccagttctccctgaagctgagctctgtgaccgctgcggacacggccgtgtattactgtgcgagagatgggagcagtggctggtaccggtggttcgacccctggggccagggaaccctggtcaccgtctcctca

SEQ ID NO: 356 - protein, 360 aa, artificial
  25G10 - HCVR
CAGGTGCAGCTGCAGGAGTCGGGCCCAGGACTGGTGAAGCCTTCGGAGACCCTGTCCCTCACCTGCACTGTCTCTGGTGGCTCCATCAGTGGTTACTACTGGAGCTGGATCCGGCAGCCCCCAGGGAAGGGACTGGAGTGGATTGGGTATATCTATTACATTGGGAGCACCAACTACAACCCCTCCCTCAAGAGTCGAGTCACCATGTCAGTAGACACGTCCAAGAACCAGTTCTCCCTGAAGCTGAGCTCTGTGACCGCTGCGGACACGGCCGTGTATTACTGTGCGAGAGATGGGAGCAGTGGCTGGTACCGGTGGTTCGACCCCTGGGGCCAGGGAACCCTGGTCACCGTCTCCTCA

SEQ ID NO: 357 - DNA, 375 bp, artificial
  16A4 - HCVR
caggtgcagctgcaggagtcgggcccaggactggcgaagccttcggagaccctgtccctcacctgcactgtctctggtgactccatcactagttactactggagctggatccggcagcccccagggaagggactggagtggattgggtatatctattacagtgggagcaccaattacaacccctccctcaagagtcgagtcaccatatcagtagacacgtccaagaaccagttctccctgaagctgagttctgtgaccgctgcggacacggccgtgtattactgtgcgagagatcaaaggcggatagcagcagctggtacccacttctacggtatggacgtctggggccaagggaccacggtcaccgtctcctca

SEQ ID NO: 358 - protein, 125 aa, artificial
  16A4 - HCVR
QVQLQESGPGLAKPSETLSLTCTVSGDSITSYYWSWIRQPPGKGLEWIGYIYYSGSTNYNPSLKSRVTISVDTSKNQFSLKLSSVTAADTAVYYCARDQRRIAAAGTHFYGMDVWGQGTTVTVSS

SEQ ID NO: 359 - DNA, 360 bp, artificial
  1F10 - HCVR
caggtgcagctgcaggagtcgggcccaggactggtgaagccttcacagaccctgtccctcacctgcactgtctctggtggctccatcagcagtggtggttactactggagctggatccgccagcacccagggaagggcctggagtggattgggtacatctattacagtgggagcacctactacaacccgtccctcacgagtcgagttaccatatcagtagacacgtctaagaaccagttctccctgaagctgagctctgtgactgccgcggacacggccgtgtattactgtgcgagagatggaagcagtggctggtacttccagcactggggccagggcaccctggtcaccgtctcctca

SEQ ID NO: 360 - protein, 120 aa, artificial
  1F10 - HCVR
QVQLQESGPGLVKPSQTLSLTCTVSGGSISSGGYYWSWIRQHPGKGLEWIGYIYYSGSTYYNPSLTSRVTISVDTSKNQFSLKLSSVTAADTAVYYCARDGSSGWYFQHWGQGTLVTVSS

SEQ ID NO: 361 - DNA, 348 bp, artificial
  4A9 - HCVR
caggtgcagctgcaggagtcgggcccaggactggtgaagccttcggagaccctgtccctcacctgcactgtctctggtggctccatcagtggttactactggagctggatccggcagcccccaggaaagggactggagtggtttgcatatttctcttacagtgggagcaccaactacaacccctccctcaagagtcgagtcaccttatcagtagacacgtccaagaaccagttctccctgaagctgagctctgtgaccgctgcggacacggccgtgtattactgtgcgaggaactgggccttccactttgacttctggggccagggaaccctggtcaccgtctcctca

SEQ ID NO: 362 - protein, 116 aa, artificial
  4A9 - HCVR
QVQLQESGPGLVKPSETLSLTCTVSGGSISGYYWSWIRQPPGKGLEWFAYFSYSGSTNYNPSLKSRVTLSVDTSKNQFSLKLSSVTAADTAVYYCARNWAFHFDFWGQGTLVTVSS

SEQ ID NO: 363 - DNA, 348 bp, artificial
  4F7 - HCVR
caggtgcagctgcaggagtcgggcccaggactggtgaagccttcggagaccctgtccctcacctgcactgtctctggtggctccatcagtagttactcctggagctggatccggcagcccccagggaagggactggagtggattgggtatatctattacagtgggagcaccaactacaacccctccctcaagagtcgagtcaccatatcattagacacgtccaagaaccagttctccctgaagctgagctctgtgaccgctgcggacacggccgtgtattactgtgcgaggaactgggccttccactttgactactggggccagggaaccctggtcaccgtctcctca

SEQ ID NO: 364 - protein, 116 aa, artificial
  4F7 - HCVR
QVQLQESGPGLVKPSETLSLTCTVSGGSISSYSWSWIRQPPGKGLEWIGYIYYSGSTNYNPSLKSRVTISLDTSKNQFSLKLSSVTAADTAVYYCARNWAFHFDYWGQGTLVTVSS

SEQ ID NO: 365 - DNA, 360 bp, artificial
  22D1 - HCVR
caggtgcagctggtgcagtctggggctgaggtgaagaagcctggggcctcagtgagggtttcctgcaaggtttctggatacaccttcaccagctactttattcactgggtacgccaggcccctggacaagggcttgagtggatgggaataatcaaccctattagtgttagcacaagctacgcacagaagttccagggcagagtcaccatgaccagggacacgtccacgagcacagtcttcatggagctgagcagcctgagatctgaggacacggccgtgtattactgtgcgcgaggggggatacagctatggttacatttggactactggggccagggaaccctggtcaccgtctcctca

SEQ ID NO: 366 - protein, 120 aa, artificial
  22D1 - HCVR
QVQLVQSGAEVKKPGASVRVSCKVSGYTFTSYFIHWVRQAPGQGLEWMGIINPISVSTSYAQKFQGRVTMTRDTSTSTVFMELSSLRSEDTAVYYCARGGIQLWLHLDYWGQGTLVTVSS

SEQ ID NO: 367 - DNA, 360 bp, artificial
  19B5 - HCVR
caggtgcagttggtgcagtctggggctgaggtgaagaagcctggggcctcagtgaaggtttcctgcaaggtttctggatacaccttcaccagctactttattcactgggtgcgccaggcccctggacaagggcttgaatggatgggaattatcaaccctattagtgttagcacaagctacgcacagaagttccagggcagagtcaccatgaccagggacacgtccacgagcacagtcttcatggagctgagcagcctgagatctgaggacacggccgtgtattactgtgcgcgaggggggatacagctatggttacatttggactactggggccagggaaccctggtcaccgtctcctca

SEQ ID NO: 368 - protein, 120 aa, artificial
  19B5 - HCVR
QVQLVQSGAEVKKPGASVKVSCKVSGYTFTSYFIHWVRQAPGQGLEWMGIINPISVSTSYAQKFQGRVTMTRDTSTSTVFMELSSLRSEDTAVYYCARGGIQLWLHLDYWGQGTLVTVSS

SEQ ID NO: 369 - DNA, 360 bp, artificial
  25F8 - HCVR
caggtgcagctggtgcagtctggggctgaggtgaagaagcctggggcctcagtgaaggtttcctgcaaggcatctggatacaccttcaccagctactatattcactgggtgcgccaggcccctggacaaggacttgagtggatgggaataatcaaccccagtggtggtagcacaaggtacgcacagaagttccagggcagagtcaccatgaccagggacacgtccacgagcacagtcttcatggagctgagcagcctgagatctgaggacacggccgtgtattactgtgcgcgagggggaatacagctatggttacattttgactactggggccagggaaccctggtcaccgtctcctca

SEQ ID NO: 370 - protein, 120 aa, artificial
  25F8 - HCVR
QVQLVQSGAEVKKPGASVKVSCKASGYTFTSYYIHWVRQAPGQGLEWMGIINPSGGSTRYAQKFQGRVTMTRDTSTSTVFMELSSLRSEDTAVYYCARGGIQLWLHFDYWGQGTLVTVSS

SEQ ID NO: 371 - DNA, 360 bp, artificial
  26D1 - HCVR
caggtgcagttggtgcagtctggggctgaggtgaagaagcctggggcctcagtgaaggtttcctgtaaggcatctagatacaccttcaccagctactatatgtcctgggtgcgacaggcccctggacaagggcttgagtggatgggaataatccaccctagtggtggtgacacaacctacgcacagaagttccagggcagagtcaccatgaccggggacacgtccacgagcacagtctacatggagctgagcagcctgagatctgaggacacggccgtgtattactgtgcgagaggggggataaaactatggttacattttgactattggggccagggaaccctggtcaccgtctcctca

SEQ ID NO: 372 - protein, 120 aa, artificial
  26D1 - HCVR
QVQLVQSGAEVKKPGASVKVSCKASRYTFTSYYMSWVRQAPGQGLEWMGIIHPSGGDTTYAQKFQGRVTMTGDTSTSTVYMELSSLRSEDTAVYYCARGGIKLWLHFDYWGQGTLVTVSS

SEQ ID NO: 373 - DNA, 357 bp, artificial
  4D2- -HCVR
caggtgcagctggtggagtctgggggaggcgtggtccagcctgggaggtccctgagactctcctgtgcagcctctggattcaccttcagtagttatgacatgcactgggtccgccaggctccaggcaaggggctggagtgggtggcagttatatcatatgatggaactaatgaatactatgcagactccgtgaagggccgattcaccatctccagagacacttccaagaacacgctgtatttgcaaatgaacagcctgagagctgaggacacggctgtatattactgtgcgagagaacgatattttgactggtcttttgactactggggccagggaaccctggtcagtgtctcctca

SEQ ID NO: 374 - protein, 119 aa, artificial; identical to SEQ ID NO: 346
  4D2- -HCVR

SEQ ID NO: 375 - DNA, 357 bp, artificial
  4E10 - HCVR
caggtgcagctggtggagtctgggggaggcgtggtccagcctgggaggtccctgagactctcctgtgcagcgtctggattcaccttcagtagctatgacatgcactgggtccgccaggctccaggcaaggggctggagtgggtggcagttatatggtatgatggaagtaataaatactatgcagactccgtgaagggccgattcaccatctccagagacaattccacgaacacgctgcatctgcaaatgaacagcccgagagccgaggacacggctgtgtactactgtgcgagagagtataggtacagctggtactttgactactggggccagggaaccctggtcaccgtctcctca

SEQ ID NO: 376 - protein, 119 aa, artificial
  4E10 - HCVR
QVQLVESGGGVVQPGRSLRLSCAASGFTFSSYDMHWVRQAPGKGLEWVAVIWYDGSNKYYADSVKGRFTISRDNSTNTLHLQMNSPRAEDTAVYYCAREYRYSWYFDYWGQGTLVTVSS

SEQ ID NO: 377 - DNA, 363 bp, artificial
  22G10 - HCVR
gaggtgcaactgttggagtctgggggaggcttggtacagcctggggggtccctgagactctcctgtgcagcctctggattcacctttagcagttatgccatgaactgggtccgccaggctccagggaaggggctggagtgggtctcaactattagtggtggtggtgctaacacatactacgcagactccgtgaagggccggttcaccatctccagtgacaattccaagagcacgctgtatctgcaaatgaacagcctgagagccgcggacacggccgtatatcactgtgcgaaagggggaatggggggatactactacggtatggacgtctggggccaagggaccacggtcaccgtctcctca

SEQ ID NO: 378 - protein, 121 aa, artificial
  22G10 - HCVR
EVQLLESGGGLVQPGGSLRLSCAASGFTFSSYAMNWVRQAPGKGLEWVSTISGGGANTYYADSVKGRFTISSDNSKSTLYLQMNSLRAADTAVYHCAKGGMGGYYYGMDVWGQGTTVTVSS

SEQ ID NO: 379 - DNA, 375 bp, artificial; identical to SEQ ID NO: 351
  2C12_LC#1 - HCVR

SEQ ID NO: 380 - protein, 125 aa, artificial; identical to SEQ ID NO: 352
  2C12_LC#1 - HCVR

SEQ ID NO: 381 - DNA, 375 bp, artificial
  2H12_LC#2 - HCVR
caggtgcagctggtggagtctgggggaggcgtggtccagcctgggaggtccctgagactctcctgtgcagcgtctggattcaccttcagtagctatggcatgcactgggtccgccaggctccaggcaaggggctggagtgggtggcagttatatggtatgatggaagtaataaatactatacagactccgtgaagggccgattcaccatctccagagacaattccaagaacacgctgtatctgcaaatgaatagcctgagagctgaggacacggctgtgtattactgtgcgagaagggccggtataataggaactacaggctactactacggtatggacgtctggggccaagggaccacggtcaccgtctcctca

SEQ ID NO: 382 - protein, 125 aa, artificial
  2H12_LC#2 - HCVR
QVQLVESGGGVVQPGRSLRLSCAASGFTFSSYGMHWVRQAPGKGLEWVAVIWYDGSNKYYTDSVKGRFTISRDNSKNTLYLQMNSLRAEDTAVYYCARRAGIIGTTGYYYGMDVWGQGTTVTVSS

SEQ ID NO: 383 - DNA, 375 bp, artificial
  2G6_LC#1 - HCVR
caggtgcagttggtggagtctgggggaggcgtggtccagcctgggaggtccctgagactctcctgtgcagcgtctggattcaccttcagtagctatggcatgcactgggtccgccaggctccaggcaaggggctggagtgggtggcatttatatggtatgatggaagtaataaatactatgcagactccgtgaaggaccgattcaccatctccagagacaattccaagaacacgctgtatctgcaaatgaaaagcctgagagctgaggacacggctgtgtattactgtgcgagaagggccggtataataggaactataggctactactacggtatggacgtctggggccaagggaccacggtcaccgtctcctca

SEQ ID NO: 384 - protein, 125 aa, artificial
  2G6_LC#1 - HCVR
QVQLVESGGGVVQPGRSLRLSCAASGFTFSSYGMHWVRQAPGKGLEWVAFIWYDGSNKYYADSVKDRFTISRDNSKNTLYLQMKSLRAEDTAVYYCARRAGIIGTIGYYYGMDVWGQGTTVTVSS

SEQ ID NO: 385 - DNA, 375 bp, artificial; identical to SEQ ID NO: 381
  2H12 - HCVR

SEQ ID NO: 386 - protein, 125 aa, artificial; identical to SEQ ID NO: 382
  2H12 - HCVR

SEQ ID NO: 387 - DNA, 375 bp, artificial; identical to SEQ ID NO: 383
  2G6 - HCVR

SEQ ID NO: 388 - protein, 125 aa, artificial; identical to SEQ ID NO: 384
  2G6 - HCVR

SEQ ID NO: 389 - DNA, 375 bp, artificial
  23A10 - HCVR
caggtgcagctggtggagtctgggggaggcgtggtccagcctgggaggtccctgagactctcctgtgcagcgtctggattcaccttcagtcgctatggcatacactgggtccgccaggctccaggcaaggggctggagtgggtggcagttatatggtatgatggaagtaataaatactatgcagactccgtgaagggccgattcaccatctccagagacaattccaagaacacgctgtatctgctaatgaacagcctgagagccgaggactcggctgtgtattactgtgcgagaagggccggtatacctggaactacgggctactactatggtatggacgtctggggccaagggaccacggtcaccgtctcctca

SEQ ID NO: 390 - protein, 125 aa, artificial
  23A10 - HCVR
QVQLVESGGGVVQPGRSLRLSCAASGFTFSRYGIHWVRQAPGKGLEWVAVIWYDGSNKYYADSVKGRFTISRDNSKNTLYLLMNSLRAEDSAVYYCARRAGIPGTTGYYYGMDVWGQGTTVTVSS

SEQ ID NO: 391 - DNA, 369 bp, artificial
  5E3 - HCVR
gaggtgcagttggtggagtctgggggaggcctggtcaagcctggggggtccctgagactctcctgtgcagcctctggattcaccttcagtagctatagcatgcactgggtccgccaggctccagggaaggggctggagtgggtctcatccattagtagtagtagtagttacatatactacgcagactcagtgaagggccgattcaccatctccagagacaacgccaagaactcactgtatctgcaaatgaacagcctgagagccgaggacacggctgtgtattactgtgcgagaggggaaactggaactaactactactactacggtatggacgtctggggccaagggaccacggtcaccgtctcctca

SEQ ID NO: 392 - protein, 123 aa, artificial
  5E3 - HCVR
EVQLVESGGGLVKPGGSLRLSCAASGFTFSSYSMHWVRQAPGKGLEWVSSISSSSSYIYYADSVKGRFTISRDNAKNSLYLQMNSLRAEDTAVYYCARGETGTNYYYYGMDVWGQGTTVTVSS

SEQ ID NO: 393 - DNA, 327 bp, artificial
  17H8, 23B6, 28D10 -LCVR
gacattgtattgacgcagtctccaggcaccctgtctttgtctccaggggaaagagccaccctctcctgcagggccagtcagagtgttgccggcagctacctagcctggtaccagcagaaacctggccaggctcccaggctcctcatctctggtgcatccagcagggccactggcatcccagacaggttcagtggcagtgggtctgggacagacttcactctcaccatcagcagactggagcctgaagattttgcagtgtattactgtcagcagtatggtaaatcaccgatcaccttcggccaagggacacgactggagatgaaagga

SEQ ID NO: 394 - protein, 109 aa, artificial
  17H8, 23B6, 28D10 -LCVR
DIVLTQSPGTLSLSPGERATLSCRASQSVAGSYLAWYQQKPGQAPRLLISGASSRATGIPDRFSGSGSGTDFTLTISRLEPEDFAVYYCQQYGKSPITFGQGTRLEMKG

SEQ ID NO: 395 - DNA, 324 bp, artificial
  4A2, 5B4, 5C5 - LCVR
gaaattgtgttgacgcagtctccaggcaccctgtctttgtctccaggggaaagagccaccctctcttgcagggccagtcggaatattagcagcagctacttagcctggtaccagcagaaacctggccaggctcccaggctcctcatctatggtccatccagcagggccactggcatcccagacaggttcagtggcagtgggtctgggacagacttcactctcaccatcagcagactggagcctgaagattttacagtgtattactgtcagcagtatggtagctcattcactttcggccctgggaccaaagtggatatcaaacga

SEQ ID NO: 396 - protein, 108 aa, artificial
  4A2, 5B4, 5C5 - LCVR
EIVLTQSPGTLSLSPGERATLSCRASRNISSSYLAWYQQKPGQAPRLLIYGPSSRATGIPDRFSGSGSGTDFTLTISRLEPEDFTVYYCQQYGSSFTFGPGTKVDIKR

SEQ ID NO: 397 - DNA, 333 bp, artificial
  16H2, 20D3, 23E7 - LCVR
cagtctgcgctgactcagccaccctcagcgactgggacccccgggcagagggtcaccatctcttgttctggaagcagctccaacatcggaagtaattttgtaaactggtacaaacaactcccaggaacggcccccaaagtcctcatctatactaataatcagcggccctcaggggtccctgaccgattctctggctccaagtctggcacctcagcctccctggccatcagtgggctccagtctgaggatgagtctgattattactgtgcaacatgggatgacagcctgaatggttgggtgttcggcggagggaccaagctgaccgtcctaggt

SEQ ID NO: 398 - protein, 111 aa, artificial
  16H2, 20D3, 23E7 - LCVR
QSALTQPPSATGTPGQRVTISCSGSSSNIGSNFVNWYKQLPGTAPKVLIYTNNQRPSGVPDRFSGSKSGTSASLAISGLQSEDESDYYCATWDDSLNGWVFGGGTKLTVLG

SEQ ID NO: 399 - DNA, 333 bp, artificial
  26F12, 27B3 - LCVR
cagtctgtgctgactcagtcaccctcagcgtctgggacccccgggcagaaggtcaccatctcttgttctggaagccgctccaacatcggaagtaattttgtaaactggtaccagcagctcccaggaacggcccccaaactcctcatctatactaattatcagcggccctcaggggtccctgaccgattctctggctccaagtctggcacctcagcctccctggccatcagtgggctccagtctgaggatgaggctgattattactgtgcagtatgggatgacagcctgaatggttgggtgttcggcggagggaccaagctgaccgtcctaggt

SEQ ID NO: 400 - protein, 111 aa, artificial
  26F12, 27B3 - LCVR
QSVLTQSPSASGTPGQKVTISCSGSRSNIGSNFVNWYQQLPGTAPKLLIYTNYQRPSGVPDRFSGSKSGTSASLAISGLQSEDEADYYCAVWDDSLNGWVFGGGTKLTVLG

SEQ ID NO: 401 - DNA, 324 bp, artificial
  4B10, 4C2 - LCVR
gaaattgtattgacgcagtctccaggcaccctgtctttgtctccaggggaaagagccaccctctcctgcagggccagtcagagtgttagcaacacctacttagcctggtaccatcagagacctggccaggctcccaggctcctcatctatggtgcatccagcagggccactggcatcccagacagattcagtggcagtgggtctgggacagacttcgctctcaccatcagcagtctggagcctgaagattttgcagtgtattactgtcagcagtacagtaactcgtggacgttcggccaagggaccaaggtggaaatcaaacga

SEQ ID NO: 402 - protein, 108 aa, artificial
  4B10, 4C2 - LCVR
EIVLTQSPGTLSLSPGERATLSCRASQSVSNTYLAWYHQRPGQAPRLLIYGASSRATGIPDRFSGSGSGTDFALTISSLEPEDFAVYYCQQYSNSWTFGQGTKVEIKR

SEQ ID NO: 403 - DNA, 324 bp, artificial
  4D3, 4F3 - LCVR
gaaattgtgttgacgcagtctccaggcaccctgtctttgtctccaggggaaagagccaccctctcctgcagggccagtcagagtgttagcagcagctacttagcctggtaccagcagaaacctggccaggctcccaggctcctcatctatggtgcatccagcagggccactggcatcccagacaggttcagtggcagtgggtctgggacagacttcactctcaccatcagcagactggaacctgaggattttgcagtgtattactgtcagcagtatggtagctcgtggacgttcggccaagggaccaaggtggaaatcaaacga

SEQ ID NO: 404 - protein, 108 aa, artificial
  4D3, 4F3 - LCVR
EIVLTQSPGTLSLSPGERATLSCRASQSVSSSYLAWYQQKPGQAPRLLIYGASSRATGIPDRFSGSGSGTDFTLTISRLEPEDFAVYYCQQYGSSWTFGQGTKVEIKR

SEQ ID NO: 405 - DNA, 324 bp, artificial
  16E2, 17E10, 20B12 - LCVR
gacatccagatgacccagtctccatcctcactgtctgcatctgtaggagacagagtcaccatcacttgtcgggcgagtcagggcattagcaattatttagcctggttacagcagaaaccagggaaagcccctaagtccctgatctatgctgcatccagtttgcaaagtggggtcccatcaaagttcagcggcagtggatctgggacagatttcactctcaccatcagcagcctgcagcctgaagattttgcaacttattactgccaacactattttacttaccctcggacgttcggccaagggaccaaggtggaaatcaaacga

SEQ ID NO: 406 - protein, 108 aa, artificial
  16E2, 17E10, 20B12 - LCVR
DIQMTQSPSSLSASVGDRVTITCRASQGISNYLAWLQQKPGKAPKSLIYAASSLQSGVPSKFSGSGSGTDFTLTISSLQPEDFATYYCQHYFTYPRTFGQGTKVEIKR

SEQ ID NO: 407 - DNA, 321 bp, artificial
  1D10, 2C12 - LCVR
tcctatgcgctgactcagccaccctcagtgtccgtgtccccaggacagacagccagcctcacctgctctggagatagattgggggaaaaatatacttgctggtatcagcagaggccaggccagtcccctttgctggtcatctatcaagataccaagcggccctcagggatccctgagcgattctctggctccacctctggtaacacagccactctgaccatcagcgggacccaggctatggatgaggctgactattactgtcaggcgtgggacagcagcactgtggtattcggcggagggaccaagctgaccgtcctaggt

SEQ ID NO: 408 - protein, 107 aa, artificial
  1D10, 2C12 - LCVR
SYALTQPPSVSVSPGQTASLTCSGDRLGEKYTCWYQQRPGQSPLLVIYQDTKRPSGIPERFSGSTSGNTATLTISGTQAMDEADYYCQAWDSSTVVFGGGTKLTVLG

SEQ ID NO: 409 - DNA, 327 bp, artificial
  16C1 - LCVR
gaaattgtgttgacgcagtctccaggcaccctgtctttgtctccaggggaaagagccaccctctcctgcagggccagccagagtgttagcagcagctacttagcctggtaccagcagaaacctggccaggctcccaggctcctcatctttggtgcatccagcagggccactggcatcccagacaggttcagtggcagtgggtctgggacagacttcactctcaccatcagcggactggagcctgaagattttgcagtgtatcactgtcagcagtatggtaactcaccgctcactttcggcggagggaccaaggtggagatcaaacga

SEQ ID NO: 410 - protein, 109 aa, artificial
  16C1 - LCVR
EIVLTQSPGTLSLSPGERATLSCRASQSVSSSYLAWYQQKPGQAPRLLIFGASSRATGIPDRFSGSGSGTDFTLTISGLEPEDFAVYHCQQYGNSPLTFGGGTKVEIKR

SEQ ID NO: 411 - DNA, 327 bp, artificial
  25G10 - LCVR
gaaattgtgttgacgcagtctccaggcaccctgtctttgtctccaggggaaagagccaccctctcctgcagggccagtcagagtgttagcagcagctacttagcctggtaccagcagaaacctggccaggctcccaggctcctcatctttggtgcatccagcagggccactggcatcccagacaggttcagtggcagtgggtctgggacagacttcactctcaccatcagcagactggagcctgaagattttgcagtgtatcactgtcagcagtatggtaactcaccgctcactttcggcggagggaccaaggtggagatcaaacga

SEQ ID NO: 412 - protein, 109 aa, artificial
  25G10
EIVLTQSPGTLSLSPGERATLSCRASQSVSSSYLAWYQQKPGQAPRLLIFGASSRATGIPDRFSGSGSGTDFTLTISRLEPEDFAVYHCQQYGNSPLTFGGGTKVEIKR

SEQ ID NO: 413 - DNA, 327 bp, artificial
  16A4 - LCVR
gaaattgtgttgacgcagtctccaggcaccctgtctttgtctccaggggaaagagccaccctctcctgcagggccagtcagagtgttagcagcagttatttagcctggtaccagcagaaacctggccaggctcccaggctcctcatctatggtacatccagcagggccactggcatcccagacaggttcagtggcagtgggtctgggacagacttcactctcaccatcagcagactggagcctgaagattttgcagtgtattattgtcagcagtacggtagctcacctttcactttcggcggagggaccaaggtggagatcaaacga

SEQ ID NO: 414 - protein, 109 aa, artificial
  16A4 - LCVR
EIVLTQSPGTLSLSPGERATLSCRASQSVSSSYLAWYQQKPGQAPRLLIYGTSSRATGIPDRFSGSGSGTDFTLTISRLEPEDFAVYYCQQYGSSPFTFGGGTKVEIKR

SEQ ID NO: 415 - DNA, 324 bp, artificial
  1F10 - LCVR
gaaattgtgttgacgcagtctccaggcaccctgtctttgtctccaggggaaagagccaccctctcctgcagggccagtcggagtattagcagcagctacttagcctggtaccagcagaaacctggccaggctcccaggctcctcatctatggtccatccagcagggccactggcatcccagacaggttcagtggcagtgggtctgggacagacttcactctcaccatcagcagactggagcctgaagattttgcagtgtattactgtcagcagtatggtagctcattcactttcggccctgggaccaaagtggatatcaaacga

SEQ ID NO: 416 - protein, 108 aa, artificial
  1F10 - LCVR
EIVLTQSPGTLSLSPGERATLSCRASRSISSSYLAWYQQKPGQAPRLLIYGPSSRATGIPDRFSGSGSGTDFTLTISRLEPEDFAVYYCQQYGSSFTFGPGTKVDIKR

SEQ ID NO: 417 - DNA, 336 bp, artificial
  4A9 - LCVR
cagtctgtgctgacgcagccgccctcagtgtctggggccccaggacagagggtcaccatctcctgcactgggagcagctccaacatcgggacaggttatgctgtacactggtaccagcagtttccaggaacagcccccaaactcctcatctatggtaacaacaatcggccctcaggggttcctgaccgattctctggctccaagtctggcacctcagcctccctggccatcactgggctccaggctgaggatgaggctgattattactgccagtcctatgacagcagactgagtggttgggtgttcggcggagggaccaagctgaccgtcctaggt

SEQ ID NO: 418 - protein, 112 aa, artificial
  4A9 - LCVR
QSVLTQPPSVSGAPGQRVTISCTGSSSNIGTGYAVHWYQQFPGTAPKLLIYGNNNRPSGVPDRFSGSKSGTSASLAITGLQAEDEADYYCQSYDSRLSGWVFGGGTKLTVLG

SEQ ID NO: 419 - DNA, 336 bp, artificial
  4F7 - LCVR
cagtctgtgctgacgcagccgccctcagtgtctggggccccagggcagagggtcaccatctcctgcactgggagcagctccaatatcgggacaggttatgatgtacactggtatcagcagcttccaggaacagcccccaaactcctcatccatggtaacagcaatcggccctcaggggtccctgaccgattctctggctccaagtctggcacctcagcctccctggccatcactgggctccaggctgaggatgaggctgattattactgccagtcctatgacagcagtctgagtggttgggtgttcggcggagggaccaggttgaccgtcctaggt

SEQ ID NO: 420 - protein, 112 aa, artificial
  4F7 - LCVR
QSVLTQPPSVSGAPGQRVTISCTGSSSNIGTGYDVHWYQQLPGTAPKLLIHGNSNRPSGVPDRFSGSKSGTSASLAITGLQAEDEADYYCQSYDSSLSGWVFGGGTRLTVLG

SEQ ID NO: 421 - DNA, 333 bp, artificial
  22D1 - LCVR
cagtctgcgctgactcagccaccctcagcgactgggacccccgggcagagggtcaccatctcttgttctggaagcagctccaacatcggaagcaattttgtaaactggtacaagcagctcccaggaacggcccccaaagtcctcatctatactaataatcagcggccctcaggggtccctgaccgattctctggctccaagtctggcacctcagcctccctggccatcagtgggctccagtctgaggatgagtctgattattactgtgcaacatgggatgacagtatgaatggttgggtgttcggcggagggaccaagctgaccgtcctaggt

SEQ ID NO: 422 - protein, 111 aa, artificial
  22D1 - LCVR
QSALTQPPSATGTPGQRVTISCSGSSSNIGSNFVNWYKQLPGTAPKVLIYTNNQRPSGVPDRFSGSKSGTSASLAISGLQSEDESDYYCATWDDSMNGWVFGGGTKLTVLG

SEQ ID NO: 423 - DNA, 333 bp, artificial
  19B5 - LCVR
cagtctgcgctgactcagccaccctcaacgactgggacccccgggcagagggtcaccatctcttgttctggaagcaggtccaacatcggaagcaattttgtaaactggtacaagcagctcccaggaacggcccccaaagtcctcatctatactaataatcagcggccctcaggggtccctgaccgattctctggctccaagtctggcacctcagcctccctggccatcagtgggctccagtctgaggatgagtctgattattactgcgcaacatgggatgacagtatgaatggttgggtgttcggcggagggaccaaactgaccgtcctaggt

SEQ ID NO: 424 - protein, 111 aa, artificial
  19B5 - LCVR
QSALTQPPSTTGTPGQRVTISCSGSRSNIGSNFVNWYKQLPGTAPKVLIYTNNQRPSGVPDRFSGSKSGTSASLAISGLQSEDESDYYCATWDDSMNGWVFGGGTKLTVLG

SEQ ID NO: 425 - DNA, 333 bp, artificial
  25F8 - LCVR
cagtctgcgctgactcagccaccctcagcgactgggacccccgggcagagggtcaccatctcttgttctggaagcagctccaacatcggaaggaattttgtaaactggtataagcagctcccaggaacggcccccaaagtcctcatttatactaataatcagcggccctcaggggtccctgaccgattctctggctccaagtctggcacctcagcctccctggccatcagtgggctccagtctgaggatgagtctgattattactgtgcagcatgggatgacagcctgaatggttgggtgttcggcggagggaccaagctgaccgtcctaggt

SEQ ID NO: 426 - protein, 111 aa, artificial
  25F8 - LCVR
QSALTQPPSATGTPGQRVTISCSGSSSNIGRNFVNWYKQLPGTAPKVLIYTNNQRPSGVPDRFSGSKSGTSASLAISGLQSEDESDYYCAAWDDSLNGWVFGGGTKLTVLG

SEQ ID NO: 427 - DNA, 333 bp, artificial
  26D1 - LCVR
cactctgtgctgactcagtcaccctcagcgtctgggacccccggacagagggtcaccatctcttgttctggaagccgctccaacatcggaagtaattttgtaaactggtaccagcagctcccaggaacggcccccaaactcctcatctatactaataatcagcggccctcaggggtccctgaccgattctctggctccaagtctggcacctcagcctccctggccatcagtgggctccagtctgaggatgaggctgattattactgtgcagtatgggatgacagcctgaatggttgggtgttcggcggagggaccaagctgaccgtcctaggt

SEQ ID NO: 428 - protein, 111 aa, artificial
  26D1 - LCVR
HSVLTQSPSASGTPGQRVTISCSGSRSNIGSNFVNWYQQLPGTAPKLLIYTNNQRPSGVPDRFSGSKSGTSASLAISGLQSEDEADYYCAVWDDSLNGWVFGGGTKLTVLG

SEQ ID NO: 429 - DNA, 324 bp, artificial
  4D2 - LCVR
gaaattgtattgacgcagtctccaggcaccctgtctttgtctccaggggaaagagccaccctctcctgcagggccagtcagagtgttagcaacacctacttagcctggtaccatcagagacctggccaggctcccaggctcctcatctatggtgcatccagcagggccgctggcatcccagacaggttcagtggcagtgggtctgggacagacttcactctcaccatcagcagactggagcctgaagattttgcagtgtattactgtcagcagtatagtaactcgtggacgttcggccaagggaccaaggtggaaatcaaacga

SEQ ID NO: 430 - protein, 108 aa, artificial
  4D2 - LCVR
EIVLTQSPGTLSLSPGERATLSCRASQSVSNTYLAWYHQRPGQAPRLLIYGASSRAAGIPDRFSGSGSGTDFTLTISRLEPEDFAVYYCQQYSNSWTFGQGTKVEIKR

SEQ ID NO: 431 - DNA, 324 bp, artificial
  4E10 - LCVR
gaaattgtgttgacgcagtctccaggcaccctgtctttgtctccaggggaaagagccaccctctcctgcagggccagtcagagtgttggcagcagctacttagcctggtaccagcagaaacctggccaggctcccaggctcctcatctatggtgcatccagcagggtcactggcatcccagacaggttcagtggcagtgggtctgggacagatttcactctcaccatcagcagactggagcctgaagattttgcagtgtattactgtcagcaatatagtaactcgtggacgttcggccaagggaccaaggtggaaatcaaacga

SEQ ID NO: 432 - protein, 108 aa, artificial
  4E10 - LCVR
EIVLTQSPGTLSLSPGERATLSCRASQSVGSSYLAWYQQKPGQAPRLLIYGASSRVTGIPDRFSGSGSGTDFTLTISRLEPEDFAVYYCQQYSNSWTFGQGTKVEIKR

SEQ ID NO: 433 - DNA, 324 bp, artificial
  22G10 - LCVR
gaaatagtgatgacgcagtctccagtcaccctgtctctgtctctaggggaaagagccaccctctcctgcagggccagtcagagtattagcagcaacttagcctggttccagcagaaacctggccaggctcccagactcctcatctatggtgcatttaccagggccactggtatcccagccagggtcagtggcagtgggtctgggacagagttcactctcaccatcagcagcctgcagtctgaagattttgcagtttattactgtcagcagtataattactggccgctcactttcggcggagggaccaaggtggagatcaagcga

SEQ ID NO: 434 - protein, 108 aa, artificial
  22G10 - LCVR
EIVMTQSPVTLSLSLGERATLSCRASQSISSNLAWFQQKPGQAPRLLIYGAFTRATGIPARVSGSGSGTEFTLTISSLQSEDFAVYYCQQYNYWPLTFGGGTKVEIKR

SEQ ID NO: 435 - DNA, 339 bp, artificial
  2C12_LC#1 - LCVR
gatgttgtgatgactcagtctccactctccctgcccgtcacccttggacagccggcctccatctcctgcaggtctagtcaaagcctcgtatacagtgatggaaacacctacttgaattggtttcagcagaggccaggccaatctccaaggcgcctaatttataaggtttctaactgggactctggggtcccagacagattcagcggcagtgggtcaggcactgatttcacactgaaaatcagcagggtggaggctgaggatgttggggtttattactgcatgcaaggtatagtgtggccgtgcagttttggccaggggaccaagctggagatcaaacga

SEQ ID NO: 436 - protein, 113 aa, artificial
  2C12_LC#1 - LCVR
DVVMTQSPLSLPVTLGQPASISCRSSQSLVYSDGNTYLNWFQQRPGQSPRRLIYKVSNWDSGVPDRFSGSGSGTDFTLKISRVEAEDVGVYYCMQGIVWPCSFGQGTKLEIKR

SEQ ID NO: 437 - DNA, 339 bp, artificial
  2H12_LC#2 - LCVR
gatgttgtgatgactcagtctccactctccctgcccgtcacccttggacagccggcctccatctcctgcaggtctagtcaaagcctcgtatacagtgatggaaacacctacttgaattggtttcagcagaggccaggccaatctccaaggcgcctaatttataaggtttctaactgggactctggggtcccagacagaatcagcggcagtgggtcaggcaccgatttcacactgaaaatcagcagggtggaggctgaggatgttggggtttattactgcatgcaagatacactgtggccgtgcagttttggccaggggaccaagctggagatcaaacga

SEQ ID NO: 438 - protein, 113 aa, artificial
  2H12_LC#2 - LCVR
DVVMTQSPLSLPVTLGQPASISCRSSQSLVYSDGNTYLNWFQQRPGQSPRRLIYKVSNWDSGVPDRISGSGSGTDFTLKISRVEAEDVGVYYCMQDTLWPCSFGQGTKLEIKR

SEQ ID NO: 439 - DNA, 339 bp, artificial
  2G6_LC#1 - LCVR
gatgttgtgatgactcagtctccactctccctgcccgtcacccttggacagccggcctccatctcctgcaggtctagtcaaagcctcgtatacagtgatggaaacacctacttgaattggtttcagcagaggccaggccaatctccacggcgcctaatttatcaggtttctaactgggactctggggtcccagacagattcagcggcagtgggtcaggcactgatttcacactgaaaatcagcagggtggaggctgaggatgttgggatttattactgcatgcaagatacactgtggccgtgcagttttggccaggggaccaagctggagatcaaacga

SEQ ID NO: 440 - protein, 113 aa, artificial
  2G6_LC#1 - LCVR
DVVMTQSPLSLPVTLGQPASISCRSSQSLVYSDGNTYLNWFQQRPGQSPRRLIYQVSNWDSGVPDRFSGSGSGTDFTLKISRVEAEDVGIYYCMQDTLWPCSFGQGTKLEIKR

SEQ ID NO: 441 - DNA, 321 bp, artificial
  2H12 - LCVR
tcctatgagctgactcagccaccctcagtgtccgtgtccccaggacagacagccagcatcacctgctctggagatagattgggggaaaaatatacttgctggtatcagcagaggccaggccagtcccctttgctggtcatctatcaagataccaagcggccctcagggatccctgagcgattctctggctccaactctggtaacacagccactctgaccatcagcgggacccagcctatggatgaggctgactattactgtcaggcgtgggacagcagcactgtggtattcggcggagggaccaagctgaccgtcctaggt

SEQ ID NO: 442 - protein, 107 aa, artificial
  2H12 - LCVR
SYELTQPPSVSVSPGQTASITCSGDRLGEKYTCWYQQRPGQSPLLVIYQDTKRPSGIPERFSGSNSGNTATLTISGTQPMDEADYYCQAWDSSTVVFGGGTKLTVLG

SEQ ID NO: 443 - DNA, 321 bp, artificial
  2G6 - LCVR
tcctatgaactgactcagccaccctcagtgtccgtgtccccaggacagacagccagcatcacctgctctggagataggttgggggaaaaatatacttgctggtatcagcagaggccaggccagtcccctttgctggtcatctatcaagataccaagcggccctcagggatccctgagcgattctctggctccaactctggtaacacagccactctgaccatcagcgggacccaggctatggatgaggctgactattactgtcaggcgtgggacagcagcactgtggtattcggcggagggaccaagctgaccgtcctaggt

SEQ ID NO: 444 - protein, 107 aa, artificial
  2G6 - LCVR
SYELTQPPSVSVSPGQTASITCSGDRLGEKYTCWYQQRPGQSPLLVIYQDTKRPSGIPERFSGSNSGNTATLTISGTQAMDEADYYCQAWDSSTVVFGGGTKLTVLG

SEQ ID NO: 445 - DNA, 321 bp, artificial
  23A10 - LCVR
tcctatgagctgactcagccaccctcagtgtccgtgtccccaggacagacagccagcatcacctgctctggagatagattgggggagaaatatgtttgctggtatcagcagaagccaggccagtcccctatactggtcatctatcaagataataagtggccctcagggatccctgagcgattctctggctccaactctgggaacacagccactctgaccatcagcgggacccaggctatggatgaggctgactattactgtcaggcgtgggacagcagcactgtggtattcggcggggggaccaagctgaccgtcctaggt

SEQ ID NO: 446 - protein, 107 aa, artificial
  23A10 - LCVR
SYELTQPPSVSVSPGQTASITCSGDRLGEKYVCWYQQKPGQSPILVIYQDNKWPSGIPERFSGSNSGNTATLTISGTQAMDEADYYCQAWDSSTVVFGGGTKLTVLG

SEQ ID NO: 447 - DNA, 321 bp, artificial
  5E3 - LCVR
tcctatgagctgactcagccaccctcagtgtccgtgtccccaggacagacagccagcatcacctgctctggagataaattgggggatgaatatgcttgctggtatcagcagaagccaggccagtcccctgtgctggtcatctatcaagatagcaagcggccctcagggatccctgagcgattctctggctccaactctgggaacacagccactctgaccatcagcgggacccaggctatggatgaggctgactattactgtcaggcgtgggacagcagcactgtggtattcggcggagggaccaagctgaccgtcctaggt

SEQ ID NO: 448 - protein, 107 aa, artificial
  5E3 - LCVR
SYELTQPPSVSVSPGQTASITCSGDKLGDEYACWYQQKPGQSPVLVIYQDSKRPSGIPERFSGSNSGNTATLTISGTQAMDEADYYCQAWDSSTVVFGGGTKLTVLG

SEQ ID NO: 449 - protein, 119 aa, artificial; identical to SEQ ID NO: 348
  4F3 VH

SEQ ID NO: 450 - protein, 116 aa, artificial; identical to SEQ ID NO: 362
  4A9 VH

SEQ ID NO: 451 - protein, 119 aa, artificial; identical to SEQ ID NO: 346
  4B10 VH

SEQ ID NO: 452 - protein, 122 aa, artificial; identical to SEQ ID NO: 338
  17H8.2 VH

SEQ ID NO: 453 - protein, 120 aa, artificial; identical to SEQ ID NO: 354
  16C1.1 VH

SEQ ID NO: 454 - protein, 125 aa, artificial; identical to SEQ ID NO: 358
  16A4.1 VH

SEQ ID NO: 455 - protein, 121 aa, artificial; identical to SEQ ID NO: 378
  22G10.1 VH

SEQ ID NO: 456 - protein, 120 aa, artificial; identical to SEQ ID NO: 342
  20D3.1 VH

SEQ ID NO: 457 - protein, 120 aa, artificial; identical to SEQ ID NO: 366
  22D1.1 VH

SEQ ID NO: 458 - protein, 120 aa, artificial; identical to SEQ ID NO: 370
  25F8.1 VH

SEQ ID NO: 459 - protein, 120 aa, artificial; identical to SEQ ID NO: 344
  26F12.1 VH

SEQ ID NO: 460 - protein, 120 aa, artificial; identical to SEQ ID NO: 372
  26D1.1 VH

SEQ ID NO: 461 - protein, 120 aa, artificial
  25G10.1 VH
QVQLQESGPGLVKPSETLSLTCTVSGGSISGYYWSWIRQPPGKGLEWIGYIYYIGSTNYNPSLKSRVTMSVDTSKNQFSLKLSSVTAADTAVYYCARDGSSGWYRWFDPWGQGTLVTVSS

SEQ ID NO: 462 - protein, 120 aa, artificial; identical to SEQ ID NO: 368
  19B5.1 VH

SEQ ID NO: 463 - protein, 120 aa, artificial; identical to SEQ ID NO: 340
  4A2 VH

SEQ ID NO: 464 - protein, 120 aa, artificial
  4A2 (1-472)(Q17E,H47P) VH
QVQLQESGPGLVKPSETLSLTCTVSGGSISSSGYYWSWIRQPPGKGLEWIGYIYYTGSAYYNPSLKSRVTISVDTSKNQFSLKLSSVTAADTAVYYCARDGSSGWYFQYWGQGTLVTVSS

SEQ ID NO: 465 - protein, 120 aa, artificial; identical to SEQ ID NO: 340
  4A2 VH

SEQ ID NO: 466 - protein, 120 aa, artificial; identical to SEQ ID NO: 464
  4A2 (1-472)(Q17E,H47P) VH

SEQ ID NO: 467 - protein, 120 aa, artificial; identical to SEQ ID NO: 464
  4A2 (1-472)(Q17E,H47P,D111E) VH

SEQ ID NO: 468 - protein, 120 aa, artificial; identical to SEQ ID NO: 464
  4A2 (1-472)(Q17E,H47P,D111E,W134Y) VH

SEQ ID NO: 469 - protein, 120 aa, artificial; identical to SEQ ID NO: 464
  4A2 VH

SEQ ID NO: 470 - protein, 120 aa, artificial; identical to SEQ ID NO: 464
  4F3 (1-471)(R17G) VH

SEQ ID NO: 471 - protein, 119 aa, artificial
  4F3 (1-471)(R17G,T47A) VH
QVQLVESGGGVVQPGGSLRLSCAASGFSFSSYDMDWVRQAPGKGLEWVAVIWYDGSNKYYADSVRGRFTISRDNSKNTLFLQMNSLRVEDTAVYYCARETGEGWYFDLWGRGTLVTVSS

SEQ ID NO: 472 - protein, 119 aa, artificial
  4F3 (1-471)(R17G,T47A,R141Q) VH
QVQLVESGGGVVQPGGSLRLSCAASGFSFSSYDMDWVRQAPGKGLEWVAVIWYDGSNKYYADSVRGRFTISRDNSKNTLFLQMNSLRVEDTAVYYCARETGEGWYFDLWGQGTLVTVSS

SEQ ID NO: 473 - protein, 119 aa, artificial
  4F3 (1-471)(R17G,T47A,D61E,D72E,R141Q) VH
QVQLVESGGGVVQPGGSLRLSCAASGFSFSSYDMDWVRQAPGKGLEWVAVIWYEGSNKYYAESVRGRFTISRDNSKNTLFLQMNSLRVEDTAVYYCARETGEGWYFDLWGQGTLVTVSS

SEQ ID NO: 474 - protein, 119 aa, artificial
  4F3 (1-471)(R17G,T47A,D61E,D72E,W134Y,R141Q) VH
QVQLVESGGGVVQPGGSLRLSCAASGFSFSSYDMDWVRQAPGKGLEWVAVIWYEGSNKYYAESVRGRFTISRDNSKNTLFLQMNSLRVEDTAVYYCARETGEGYYFDLWGQGTLVTVSS

SEQ ID NO: 475 - protein, 125 aa, artificial
  2G6 (1-477)(R17G,D61E,D72E,K94N) VH
QVQLVESGGGVVQPGGSLRLSCAASGFTFSSYGMHWVRQAPGKGLEWVAFIWYEGSNKYYAESVKDRFTISRDNSKNTLYLQMNSLRAEDTAVYYCARRAGIIGTIGYYYGMDVWGQGTTVTVSS

SEQ ID NO: 476 - protein, 120 aa, artificial; identical to SEQ ID NO: 354
  16C1.1 VH

SEQ ID NO: 477 - protein, 120 aa, artificial
  16C1.1 (1-469)(T92K) VH
QVQLQESGPGLVKPSETLSLTCTVSGGSISGYYWSWIRQPPGKGLEWIGYIYYIGSTNYNPSLKSRVTMSIDTSKNQFSLKLSSLTAADTAVYFCARDGSSGWYRWFDPWGQGTLVTVSS

SEQ ID NO: 478 - protein, 120 aa, artificial
  16C1.1 (1-469)(T92K,D109E) VH
QVQLQESGPGLVKPSETLSLTCTVSGGSISGYYWSWIRQPPGKGLEWIGYIYYIGSTNYNPSLKSRVTMSIDTSKNQFSLKLSSLTAADTAVYFCAREGSSGWYRWFDPWGQGTLVTVSS

SEQ ID NO: 479 - protein, 120 aa, artificial
  16C1.1 (1-469)(T92K,W132Y,W135Y) VH
QVQLQESGPGLVKPSETLSLTCTVSGGSISGYYWSWIRQPPGKGLEWIGYIYYIGSTNYNPSLKSRVTMSIDTSKNQFSLKLSSLTAADTAVYFCARDGSSGYYRYFDPWGQGTLVTVSS

SEQ ID NO: 480 - protein, 120 aa, artificial; identical to SEQ ID NO: 477
  16C1.1 (1-469)(T92K) VH

SEQ ID NO: 481 - protein, 122 aa, artificial; identical to SEQ ID NO: 338
  17H8.2 VH

SEQ ID NO: 482 - protein, 122 aa, artificial
  17H8.2 (1-471)(D109E) VH
QVQLQESGPGLVKPSETLSLTCTVSGGSINSYYWSWIRQPPGKGLEWIGYIYYIGSTNYNPSLKSRVTISVDTSKNQFSLKLSSVTAADTALYYCARESRYRSGWYDAFDIWGQGTMVTVSS

SEQ ID NO: 483 - protein, 122 aa, artificial
  17H8.2 (1-471)(D109E,W132Y) VH
QVQLQESGPGLVKPSETLSLTCTVSGGSINSYYWSWIRQPPGKGLEWIGYIYYIGSTNYNPSLKSRVTISVDTSKNQFSLKLSSVTAADTALYYCARESRYRSGYYDAFDIWGQGTMVTVSS

SEQ ID NO: 484 - protein, 122 aa, artificial; identical to SEQ ID NO: 482
  17H8.2 (1-471)(D109E) VH

SEQ ID NO: 485 - protein, 116 aa, artificial; identical to SEQ ID NO: 364
  4F7 VH

SEQ ID NO: 486 - protein, 116 aa, artificial; identical to SEQ ID NO: 364
  4F7 VH

SEQ ID NO: 487 - protein, 116 aa, artificial
  4F7 (1-468)(W113Y) VH
QVQLQESGPGLVKPSETLSLTCTVSGGSISSYSWSWIRQPPGKGLEWIGYIYYSGSTNYNPSLKSRVTISLDTSKNQFSLKLSSVTAADTAVYYCARNYAFHFDYWGQGTLVTVSS

SEQ ID NO: 488 - protein, 119 aa, artificial
  4B10 (1-471)(R17G,D61E,D72E,W134Y) VH
QVQLVESGGGVVQPGGSLRLSCAASGFTFSSYDMHWVRQAPGKGLEWVAVISYEGTNEYYAESVKGRFTISRDTSKNTLYLQMNSLRAEDTAVYYCARERYFDYSFDYWGQGTLVSVSS

SEQ ID NO: 489 - protein, 119 aa, artificial; identical to SEQ ID NO: 346
  4B10 VH

SEQ ID NO: 490 - protein, 119 aa, artificial
  4B10 (1-471)(R17G) VH
QVQLVESGGGVVQPGGSLRLSCAASGFTFSSYDMHWVRQAPGKGLEWVAVISYDGTNEYYADSVKGRFTISRDTSKNTLYLQMNSLRAEDTAVYYCARERYFDWSFDYWGQGTLVSVSS

SEQ ID NO: 491 - protein, 119 aa, artificial
  4B10 (1-471)(R17G,D61E,D72E) VH
QVQLVESGGGVVQPGGSLRLSCAASGFTFSSYDMHWVRQAPGKGLEWVAVISYEGTNEYYAESVKGRFTISRDTSKNTLYLQMNSLRAEDTAVYYCARERYFDWSFDYWGQGTLVSVSS

SEQ ID NO: 492 - protein, 116 aa, artificial; identical to SEQ ID NO: 362
  4A9 VH

SEQ ID NO: 493 - protein, 116 aa, artificial
  4A9 (1-468)(F55I,A56G) VH
QVQLQESGPGLVKPSETLSLTCTVSGGSISGYYWSWIRQPPGKGLEWIGYFSYSGSTNYNPSLKSRVTLSVDTSKNQFSLKLSSVTAADTAVYYCARNWAFHFDFWGQGTLVTVSS

SEQ ID NO: 494 - protein, 116 aa, artificial; identical to SEQ ID NO: 493
  4A9 (1-468)(F55I,A56G) VH

SEQ ID NO: 495 - protein, 116 aa, artificial
  4A9 (1-468)(F55I,A56G,W113Y) VH
QVQLQESGPGLVKPSETLSLTCTVSGGSISGYYWSWIRQPPGKGLEWIGYFSYSGSTNYNPSLKSRVTLSVDTSKNQFSLKLSSVTAADTAVYYCARNYAFHFDFWGQGTLVTVSS

SEQ ID NO: 496 - protein, 120 aa, artificial; identical to SEQ ID NO: 342
  20D3.1 VH

SEQ ID NO: 497 - protein, 120 aa, artificial; identical to SEQ ID NO: 342
  20D3.1 VH

SEQ ID NO: 498 - protein, 120 aa, artificial
  20D3.1 (1-469)(W133Y) VH
QVQLVQSGAEVKKPGASVKVSCKVSGYTFTSYFIHWVRQAPGQGLEWMGIINPISVSTSYAQKFQGRVTMTRDTSTSTVFMELSSLRSEDTAVYYCARGGIQLYLHFDYWGQGTLVTVSS

SEQ ID NO: 499 - protein, 120 aa, artificial; identical to SEQ ID NO: 498
  20D3.1 (1-469)(W133Y) VH

SEQ ID NO: 500 - protein, 120 aa, artificial; identical to SEQ ID NO: 498
  20D3.1 (1-469)(W133Y) VH

SEQ ID NO: 501 - protein, 121 aa, artificial
  22G10.1 (1-470)(S82R,A99E) VH
EVQLLESGGGLVQPGGSLRLSCAASGFTFSSYAMNWVRQAPGKGLEWVSTISGGGANTYYADSVKGRFTISRDNSKSTLYLQMNSLRAEDTAVYHCAKGGMGGYYYGMDVWGQGTTVTVSS

SEQ ID NO: 502 - protein, 121 aa, artificial; identical to SEQ ID NO: 501
  22G10.1 (1-470)(A99E,H105Y) VH

SEQ ID NO: 503 - protein, 121 aa, artificial
  22G10.1 (1-470)(A99E) VH
EVQLLESGGGLVQPGGSLRLSCAASGFTFSSYAMNWVRQAPGKGLEWVSTISGGGANTYYADSVKGRFTISSDNSKSTLYLQMNSLRAEDTAVYHCAKGGMGGYYYGMDVWGQGTTVTVSS

SEQ ID NO: 504 - protein, 121 aa, artificial; identical to SEQ ID NO: 503
  22G10.1 (1-470)(A99E) VH

SEQ ID NO: 505 - protein, 121 aa, artificial
  22G10.1 (1-470)(D72E,A99E) VH
EVQLLESGGGLVQPGGSLRLSCAASGFTFSSYAMNWVRQAPGKGLEWVSTISGGGANTYYAESVKGRFTISSDNSKSTLYLQMNSLRAEDTAVYHCAKGGMGGYYYGMDVWGQGTTVTVSS

SEQ ID NO: 506 - protein, 121 aa, artificial
  22G10.1 (1-470)(H105Y) VH
EVQLLESGGGLVQPGGSLRLSCAASGFTFSSYAMNWVRQAPGKGLEWVSTISGGGANTYYADSVKGRFTISSDNSKSTLYLQMNSLRAADTAVYYCAKGGMGGYYYGMDVWGQGTTVTVSS

SEQ ID NO: 507 - protein, 125 aa, artificial
  16A4.1 (1-474)(T144L) VH
QVQLQESGPGLAKPSETLSLTCTVSGDSITSYYWSWIRQPPGKGLEWIGYIYYSGSTNYNPSLKSRVTISVDTSKNQFSLKLSSVTAADTAVYYCARDQRRIAAAGTHFYGMDVWGQGTLVTVSS

SEQ ID NO: 508 - protein, 120 aa, artificial; identical to SEQ ID NO: 368
  19B5.1 VH

SEQ ID NO: 509 - protein, 120 aa, artificial
  19B5.1 (1-469)(W133Y) VH
QVQLVQSGAEVKKPGASVKVSCKVSGYTFTSYFIHWVRQAPGQGLEWMGIINPISVSTSYAQKFQGRVTMTRDTSTSTVFMELSSLRSEDTAVYYCARGGIQLYLHLDYWGQGTLVTVSS

SEQ ID NO: 510 - protein, 120 aa, artificial; identical to SEQ ID NO: 368
  19B5.1 VH

SEQ ID NO: 511 - protein, 120 aa, artificial; identical to SEQ ID NO: 368
  19B5.1 VH

SEQ ID NO: 512 - protein, 120 aa, artificial; identical to SEQ ID NO: 509
  19B5.1 (1-469)(W133Y) VH

SEQ ID NO: 513 - protein, 125 aa, artificial
  23A10.3 (1-474)(L92Q) VH
QVQLVESGGGVVQPGRSLRLSCAASGFTFSRYGIHWVRQAPGKGLEWVAVIWYDGSNKYYADSVKGRFTISRDNSKNTLYLQMNSLRAEDSAVYYCARRAGIPGTTGYYYGMDVWGQGTTVTVSS

SEQ ID NO: 514 - protein, 125 aa, artificial
  23A10.3 (1-474)(R17G,L92Q) VH
QVQLVESGGGVVQPGGSLRLSCAASGFTFSRYGIHWVRQAPGKGLEWVAVIWYDGSNKYYADSVKGRFTISRDNSKNTLYLQMNSLRAEDSAVYYCARRAGIPGTTGYYYGMDVWGQGTTVTVSS

SEQ ID NO: 515 - protein, 125 aa, artificial
  23A10.3 (1-474)(R17G,D61E,D72E,L92Q) VH
QVQLVESGGGVVQPGGSLRLSCAASGFTFSRYGIHWVRQAPGKGLEWVAVIWYEGSNKYYAESVKGRFTISRDNSKNTLYLQMNSLRAEDSAVYYCARRAGIPGTTGYYYGMDVWGQGTTVTVSS

SEQ ID NO: 516 - protein, 125 aa, artificial; identical to SEQ ID NO: 390
  23A10.3 VH

SEQ ID NO: 517 - protein, 120 aa, artificial; identical to SEQ ID NO: 461
  25G10.1 VH

SEQ ID NO: 518 - protein, 120 aa, artificial
  25G10.1 (1-469)(D109E,W132Y,W135Y) VH
QVQLQESGPGLVKPSETLSLTCTVSGGSISGYYWSWIRQPPGKGLEWIGYIYYIGSTNYNPSLKSRVTMSVDTSKNQFSLKLSSVTAADTAVYYCAREGSSGYYRYFDPWGQGTLVTVSS

SEQ ID NO: 519 - protein, 120 aa, artificial; identical to SEQ ID NO: 372
  26D1.1 VH

SEQ ID NO: 520 - protein, 120 aa, artificial; identical to SEQ ID NO: 372
  26D1.1 VH

SEQ ID NO: 521 - protein, 120 aa, artificial; identical to SEQ ID NO: 372
  26D1.1 VH

SEQ ID NO: 522 - protein, 120 aa, artificial; identical to SEQ ID NO: 372
  26D1.1 VH

SEQ ID NO: 523 - protein, 120 aa, artificial
  26D1.1 (1-469)(W133Y) VH
QVQLVQSGAEVKKPGASVKVSCKASRYTFTSYYMSWVRQAPGQGLEWMGIIHPSGGDTTYAQKFQGRVTMTGDTSTSTVYMELSSLRSEDTAVYYCARGGIKLYLHFDYWGQGTLVTVSS

SEQ ID NO: 524 - protein, 120 aa, artificial
  26D1.1 (1-469)(R27G,G82R) VH
QVQLVQSGAEVKKPGASVKVSCKASGYTFTSYYMSWVRQAPGQGLEWMGIIHPSGGDTTYAQKFQGRVTMTRDTSTSTVYMELSSLRSEDTAVYYCARGGIKLWLHFDYWGQGTLVTVSS

SEQ ID NO: 525 - protein, 120 aa, artificial; identical to SEQ ID NO: 344
  26F12.1 VH

SEQ ID NO: 526 - protein, 120 aa, artificial; identical to SEQ ID NO: 344
  26F12.1 VH

SEQ ID NO: 527 - protein, 120 aa, artificial
  26F12.1 (1-469)(W133Y) VH
QVQLVQSGAEVKKPGASVKVSCKASRYTFTNYYMSWVRQAPGQGLEWMGIINPSGGDSTYAQKFQGRLTMTGDTSTSTVYMELSSLRSEDTAVYYCARGGIQLYLHFDYWGQGTLVTVSS

SEQ ID NO: 528 - protein, 120 aa, artificial; identical to SEQ ID NO: 527
  26F12.1 (1-469)(W133Y) VH

SEQ ID NO: 529 - protein, 120 aa, artificial; identical to SEQ ID NO: 370
  25F8.1 VH

SEQ ID NO: 530 - protein, 120 aa, artificial; identical to SEQ ID NO: 370
  25F8.1 VH

SEQ ID NO: 531 - protein, 120 aa, artificial
  25F8.1 (1-469)(F90Y) VH
QVQLVQSGAEVKKPGASVKVSCKASGYTFTSYYIHWVRQAPGQGLEWMGIINPSGGSTRYAQKFQGRVTMTRDTSTSTVYMELSSLRSEDTAVYYCARGGIQLWLHFDYWGQGTLVTVSS

SEQ ID NO: 532 - protein, 120 aa, artificial; identical to SEQ ID NO: 531
  25F8.1 (1-469)(F90Y) VH

SEQ ID NO: 533 - protein, 120 aa, artificial
  25F8.1 (1-469)(F90Y,W133Y) VH
QVQLVQSGAEVKKPGASVKVSCKASGYTFTSYYIHWVRQAPGQGLEWMGIINPSGGSTRYAQKFQGRVTMTRDTSTSTVYMELSSLRSEDTAVYYCARGGIQLYLHFDYWGQGTLVTVSS

SEQ ID NO: 534 - protein, 120 aa, artificial; identical to SEQ ID NO: 366
  22D1.1 VH

SEQ ID NO: 535 - protein, 120 aa, artificial; identical to SEQ ID NO: 366
  22D1.1 VH

SEQ ID NO: 536 - protein, 120 aa, artificial
  22D1.1 (1-469)(W133Y) VH
QVQLVQSGAEVKKPGASVRVSCKVSGYTFTSYFIHWVRQAPGQGLEWMGIINPISVSTSYAQKFQGRVTMTRDTSTSTVFMELSSLRSEDTAVYYCARGGIQLYLHLDYWGQGTLVTVSS

SEQ ID NO: 537 - protein, 120 aa, artificial; identical to SEQ ID NO: 536
  22D1.1 (1-469)(W133Y) VH

SEQ ID NO: 538 - protein, 120 aa, artificial
  22D1.1 (1-469)(F90Y) VH
QVQLVQSGAEVKKPGASVRVSCKVSGYTFTSYFIHWVRQAPGQGLEWMGIINPISVSTSYAQKFQGRVTMTRDTSTSTVYMELSSLRSEDTAVYYCARGGIQLWLHLDYWGQGTLVTVSS

SEQ ID NO: 539 - protein, 116 aa, artificial; identical to SEQ ID NO: 364
  4F7 VH

SEQ ID NO: 540 - protein, 125 aa, artificial; identical to SEQ ID NO: 384
  2G6 VH

SEQ ID NO: 541 - protein, 125 aa, artificial
  2G6 (1-477)(R17G,K94N) VH
QVQLVESGGGVVQPGGSLRLSCAASGFTFSSYGMHWVRQAPGKGLEWVAFIWYDGSNKYYADSVKDRFTISRDNSKNTLYLQMNSLRAEDTAVYYCARRAGIIGTIGYYYGMDVWGQGTTVTVSS

SEQ ID NO: 542 - protein, 125 aa, artificial
  2G6 (1-477)(D61E,D72E) VH
QVQLVESGGGVVQPGRSLRLSCAASGFTFSSYGMHWVRQAPGKGLEWVAFIWYEGSNKYYAESVKDRFTISRDNSKNTLYLQMKSLRAEDTAVYYCARRAGIIGTIGYYYGMDVWGQGTTVTVSS

SEQ ID NO: 543 - protein, 125 aa, artificial
  2G6 (1-477)(R17G) VH
QVQLVESGGGVVQPGGSLRLSCAASGFTFSSYGMHWVRQAPGKGLEWVAFIWYDGSNKYYADSVKDRFTISRDNSKNTLYLQMKSLRAEDTAVYYCARRAGIIGTIGYYYGMDVWGQGTTVTVSS

SEQ ID NO: 544 - protein, 108 aa, artificial; identical to SEQ ID NO: 404
  4F3 VL

SEQ ID NO: 545 - protein, 112 aa, artificial; identical to SEQ ID NO: 418
  4A9 VL

SEQ ID NO: 546 - protein, 108 aa, artificial; identical to SEQ ID NO: 402
  4B10 VL

SEQ ID NO: 547 - protein, 109 aa, artificial; identical to SEQ ID NO: 394
  17H8.2 VL

SEQ ID NO: 548 - protein, 109 aa, artificial; identical to SEQ ID NO: 410
  16C1.1 VL

SEQ ID NO: 549 - protein, 109 aa, artificial; identical to SEQ ID NO: 414
  16A4.1 VL

SEQ ID NO: 550 - protein, 108 aa, artificial; identical to SEQ ID NO: 434
  22G10.1 VL

SEQ ID NO: 551 - protein, 111 aa, artificial; identical to SEQ ID NO: 398
  20D3.1 VL

SEQ ID NO: 552 - protein, 111 aa, artificial; identical to SEQ ID NO: 422
  22D1.1 VL

SEQ ID NO: 553 - protein, 111 aa, artificial; identical to SEQ ID NO: 426
  25F8.1 VL

SEQ ID NO: 554 - protein, 111 aa, artificial; identical to SEQ ID NO: 400
  26F12.1 VL

SEQ ID NO: 555 - protein, 111 aa, artificial; identical to SEQ ID NO: 428
  26D1.1 VL

SEQ ID NO: 556 - protein, 109 aa, artificial; identical to SEQ ID NO: 412
  25G10.1 VL

SEQ ID NO: 557 - protein, 111 aa, artificial; identical to SEQ ID NO: 424
  19B5.1 VL

SEQ ID NO: 558 - protein, 108 aa, artificial
  4A2 (1-236)(N30Q) VL
EIVLTQSPGTLSLSPGERATLSCRASRQISSSYLAWYQQKPGQAPRLLIYGPSSRATGIPDRFSGSGSGTDFTLTISRLEPEDFTVYYCQQYGSSFTFGPGTKVDIKR

SEQ ID NO: 559 - protein, 108 aa, artificial
  4A2 (1-236)(N30Q,T102A,P141Q) VL
EIVLTQSPGTLSLSPGERATLSCRASRQISSSYLAWYQQKPGQAPRLLIYGPSSRATGIPDRFSGSGSGTDFTLTISRLEPEDFAVYYCQQYGSSFTFGQGTKVDIKR

SEQ ID NO: 560 - protein, 108 aa, artificial
  4A2 (1-236)(N30Q,T102A) VL
EIVLTQSPGTLSLSPGERATLSCRASRQISSSYLAWYQQKPGQAPRLLIYGPSSRATGIPDRFSGSGSGTDFTLTISRLEPEDFAVYYCQQYGSSFTFGPGTKVDIKR

SEQ ID NO: 561 - protein, 108 aa, artificial; identical to SEQ ID NO: 560
  4A2 (1-236)(N30Q,T102A) VL

SEQ ID NO: 562 - protein, 108 aa, artificial; identical to SEQ ID NO: 559
  4A2 (1-236)(N30Q,T102A,P141Q) VL

SEQ ID NO: 563 - protein, 108 aa, artificial; identical to SEQ ID NO: 559
  4A2 (1-236)(N30Q,T102A,P141Q) VL

SEQ ID NO: 564 - protein, 108 aa, artificial
  4A2 (1-236)(R29Q,N30S) VL
EIVLTQSPGTLSLSPGERATLSCRASQSISSSYLAWYQQKPGQAPRLLIYGPSSRATGIPDRFSGSGSGTDFTLTISRLEPEDFTVYYCQQYGSSFTFGPGTKVDIKR

SEQ ID NO: 565 - protein, 108 aa, artificial; identical to SEQ ID NO: 404
  4F3 VL

SEQ ID NO: 566 - protein, 108 aa, artificial; identical to SEQ ID NO: 404
  4F3 VL

SEQ ID NO: 567 - protein, 108 aa, artificial; identical to SEQ ID NO: 404
  4F3 VL

SEQ ID NO: 568 - protein, 108 aa, artificial; identical to SEQ ID NO: 404
  4F3 VL

SEQ ID NO: 569 - protein, 108 aa, artificial; identical to SEQ ID NO: 404
  4F3 VL

SEQ ID NO: 570 - protein, 107 aa, artificial
  2G6 (1-234)(C42S,D110E) VL
SYELTQPPSVSVSPGQTASITCSGDRLGEKYTSWYQQRPGQSPLLVIYQDTKRPSGIPERFSGSNSGNTATLTISGTQAMDEADYYCQAWESSTVVFGGGTKLTVLG

SEQ ID NO: 571 - protein, 109 aa, artificial
  16C1.1 (1-235)(H105Y) VL
EIVLTQSPGTLSLSPGERATLSCRASQSVSSSYLAWYQQKPGQAPRLLIFGASSRATGIPDRFSGSGSGTDFTLTISGLEPEDFAVYYCQQYGNSPLTFGGGTKVEIKR

SEQ ID NO: 572 - protein, 109 aa, artificial; identical to SEQ ID NO: 571
  16C1.1 (1-235)(H105Y) VL

SEQ ID NO: 573 - protein, 109 aa, artificial; identical to SEQ ID NO: 571
  16C1.1 (1-235)(H105Y) VL

SEQ ID NO: 574 - protein, 109 aa, artificial; identical to SEQ ID NO: 571
  16C1.1 (1-235)(H105Y) VL

SEQ ID NO: 575 - protein, 109 aa, artificial
  16C1.1 (1-235)(G95R,H105Y,G141Q) VL
EIVLTQSPGTLSLSPGERATLSCRASQSVSSSYLAWYQQKPGQAPRLLIFGASSRATGIPDRFSGSGSGTDFTLTISRLEPEDFAVYYCQQYGNSPLTFGQGTKVEIKR

SEQ ID NO: 576 - protein, 109 aa, artificial
  17H8.2 (1-235)(G149R) VL
DIVLTQSPGTLSLSPGERATLSCRASQSVAGSYLAWYQQKPGQAPRLLISGASSRATGIPDRFSGSGSGTDFTLTISRLEPEDFAVYYCQQYGKSPITFGQGTRLEMKR

SEQ ID NO: 577 - protein, 109 aa, artificial; identical to SEQ ID NO: 576
  17H8.2 (1-235)(G149R) VL

SEQ ID NO: 578 - protein, 109 aa, artificial; identical to SEQ ID NO: 576
  17H8.2 (1-235)(G149R) VL

SEQ ID NO: 579 - protein, 109 aa, artificial
  17H8.2 (1-235)(S57Y,G149R) VL
DIVLTQSPGTLSLSPGERATLSCRASQSVAGSYLAWYQQKPGQAPRLLIYGASSRATGIPDRFSGSGSGTDFTLTISRLEPEDFAVYYCQQYGKSPITFGQGTRLEMKR

SEQ ID NO: 580 - protein, 112 aa, artificial
  4F7 (1-239)(H57Y) VL
QSVLTQPPSVSGAPGQRVTISCTGSSSNIGTGYDVHWYQQLPGTAPKLLIYGNSNRPSGVPDRFSGSKSGTSASLAITGLQAEDEADYYCQSYDSSLSGWVFGGGTRLTVLG

SEQ ID NO: 581 - protein, 112 aa, artificial
  4F7 (1-239)(H57Y,D110E) VL
QSVLTQPPSVSGAPGQRVTISCTGSSSNIGTGYDVHWYQQLPGTAPKLLIYGNSNRPSGVPDRFSGSKSGTSASLAITGLQAEDEADYYCQSYESSLSGWVFGGGTRLTVLG

SEQ ID NO: 582 - protein, 112 aa, artificial
  4F7 (1-239)(D110E) VL
QSVLTQPPSVSGAPGQRVTISCTGSSSNIGTGYDVHWYQQLPGTAPKLLIHGNSNRPSGVPDRFSGSKSGTSASLAITGLQAEDEADYYCQSYESSLSGWVFGGGTRLTVLG

SEQ ID NO: 583 - protein, 108 aa, artificial
  4B10 (1-236)(H45Q,A90T) VL
EIVLTQSPGTLSLSPGERATLSCRASQSVSNTYLAWYQQRPGQAPRLLIYGASSRATGIPDRFSGSGSGTDFTLTISSLEPEDFAVYYCQQYSNSWTFGQGTKVEIKR

SEQ ID NO: 584 - protein, 108 aa, artificial; identical to SEQ ID NO: 583
  4B10 (1-236)(H45Q,A90T) VL

SEQ ID NO: 585 - protein, 108 aa, artificial; identical to SEQ ID NO: 583
  4B10 (1-236)(H45Q,A90T) VL

SEQ ID NO: 586 - protein, 108 aa, artificial; identical to SEQ ID NO: 583
  4B10 (1-236)(H45Q,A90T) VL

SEQ ID NO: 587 - protein, 112 aa, artificial
  4A9 (1-239)(F47L) VL
QSVLTQPPSVSGAPGQRVTISCTGSSSNIGTGYAVHWYQQLPGTAPKLLIYGNNNRPSGVPDRFSGSKSGTSASLAITGLQAEDEADYYCQSYDSRLSGWVFGGGTKLTVLG

SEQ ID NO: 588 - protein, 112 aa, artificial; identical to SEQ ID NO: 587
  4A9 (1-239)(F47L) VL

SEQ ID NO: 589 - protein, 112 aa, artificial
  4A9 (1-239)(F47L,D110E) VL
QSVLTQPPSVSGAPGQRVTISCTGSSSNIGTGYAVHWYQQLPGTAPKLLIYGNNNRPSGVPDRFSGSKSGTSASLAITGLQAEDEADYYCQSYESRLSGWVFGGGTKLTVLG

SEQ ID NO: 590 - protein, 112 aa, artificial; identical to SEQ ID NO: 589
  4A9 (1-239)(F47L,D110E) VL

SEQ ID NO: 591 - protein, 111 aa, artificial
  20D3.1 (1-235)(S102A) VL
QSALTQPPSATGTPGQRVTISCSGSSSNIGSNFVNWYKQLPGTAPKVLIYTNNQRPSGVPDRFSGSKSGTSASLAISGLQSEDEADYYCATWDDSLNGWVFGGGTKLTVLG

SEQ ID NO: 592 - protein, 111 aa, artificial
  20D3.1 (1-235)(K45Q,S102A) VL
QSALTQPPSATGTPGQRVTISCSGSSSNIGSNFVNWYQQLPGTAPKVLIYTNNQRPSGVPDRFSGSKSGTSASLAISGLQSEDEADYYCATWDDSLNGWVFGGGTKLTVLG

SEQ ID NO: 593 - protein, 111 aa, artificial; identical to SEQ ID NO: 592
  20D3.1 (1-235)(K45Q,S102A) VL

SEQ ID NO: 594 - protein, 111 aa, artificial
  20D3.1 (1-235)(K45Q,S102A,D111E,N135Q) VL
QSALTQPPSATGTPGQRVTISCSGSSSNIGSNFVNWYQQLPGTAPKVLIYTNNQRPSGVPDRFSGSKSGTSASLAISGLQSEDEADYYCATWDESLQGWVFGGGTKLTVLG

SEQ ID NO: 595 - protein, 111 aa, artificial
  20D3.1 (1-235)(W109Y) VL
QSALTQPPSATGTPGQRVTISCSGSSSNIGSNFVNWYKQLPGTAPKVLIYTNNQRPSGVPDRFSGSKSGTSASLAISGLQSEDESDYYCATYDDSLNGWVFGGGTKLTVLG

SEQ ID NO: 596 - protein, 108 aa, artificial; identical to SEQ ID NO: 434
  22G10.1 VL

SEQ ID NO: 597 - protein, 108 aa, artificial; identical to SEQ ID NO: 434
  22G10.1 VL

SEQ ID NO: 598 - protein, 108 aa, artificial
  22G10.1 (1-234)(Q97E,S98P) VL
EIVMTQSPVTLSLSLGERATLSCRASQSISSNLAWFQQKPGQAPRLLIYGAFTRATGIPARVSGSGSGTEFTLTISSLEPEDFAVYYCQQYNYWPLTFGGGTKVEIKR

SEQ ID NO: 599 - protein, 108 aa, artificial
  22G10.1 (1-234)(V78F,Q97E,S98P) VL
EIVMTQSPVTLSLSLGERATLSCRASQSISSNLAWFQQKPGQAPRLLIYGAFTRATGIPARFSGSGSGTEFTLTISSLEPEDFAVYYCQQYNYWPLTFGGGTKVEIKR

SEQ ID NO: 600 - protein, 108 aa, artificial; identical to SEQ ID NO: 599
  22G10.1 (1-234)(V78F,Q97E,S98P) VL

SEQ ID NO: 601 - protein, 108 aa, artificial; identical to SEQ ID NO: 434
  22G10.1 VL

SEQ ID NO: 602 - protein, 109 aa, artificial
  16A4.1 (1-235)(G141Q) VL
EIVLTQSPGTLSLSPGERATLSCRASQSVSSSYLAWYQQKPGQAPRLLIYGTSSRATGIPDRFSGSGSGTDFTLTISRLEPEDFAVYYCQQYGSSPFTFGQGTKVEIKR

SEQ ID NO: 603 - protein, 111 aa, artificial
  19B5.1 (1-235)(K45Q,S102A) VL
QSALTQPPSTTGTPGQRVTISCSGSRSNIGSNFVNWYQQLPGTAPKVLIYTNNQRPSGVPDRFSGSKSGTSASLAISGLQSEDEADYYCATWDDSMNGWVFGGGTKLTVLG

SEQ ID NO: 604 - protein, 111 aa, artificial; identical to SEQ ID NO: 603
  19B5.1 (1-235)(K45Q,S102A) VL

SEQ ID NO: 605 - protein, 111 aa, artificial
  19B5.1 (1-235)(T11V,K45Q,S102A) VL
QSALTQPPSVTGTPGQRVTISCSGSRSNIGSNFVNWYQQLPGTAPKVLIYTNNQRPSGVPDRFSGSKSGTSASLAISGLQSEDEADYYCATWDDSMNGWVFGGGTKLTVLG

SEQ ID NO: 606 - protein, 111 aa, artificial
  19B5.1 (1-235)(T11V,K45Q,S102A,D111E,N135Q) VL
QSALTQPPSVTGTPGQRVTISCSGSRSNIGSNFVNWYQQLPGTAPKVLIYTNNQRPSGVPDRFSGSKSGTSASLAISGLQSEDEADYYCATWDESMQGWVFGGGTKLTVLG

SEQ ID NO: 607 - protein, 111 aa, artificial
  19B5.1 (1-235)(T11V,K45Q,S102A,W109Y,D111E,N135Q) VL
QSALTQPPSVTGTPGQRVTISCSGSRSNIGSNFVNWYQQLPGTAPKVLIYTNNQRPSGVPDRFSGSKSGTSASLAISGLQSEDEADYYCATYDESMQGWVFGGGTKLTVLG

SEQ ID NO: 608 - protein, 107 aa, artificial
  23A10.3 (1-231)(C42S) VL
SYELTQPPSVSVSPGQTASITCSGDRLGEKYVSWYQQKPGQSPILVIYQDNKWPSGIPERFSGSNSGNTATLTISGTQAMDEADYYCQAWDSSTVVFGGGTKLTVLG

SEQ ID NO: 609 - protein, 107 aa, artificial; identical to SEQ ID NO: 608
  23A10.3 (1-231)(C42S) VL

SEQ ID NO: 610 - protein, 107 aa, artificial
  23A10.3 (1-231)(C42S,D110E) VL
SYELTQPPSVSVSPGQTASITCSGDRLGEKYVSWYQQKPGQSPILVIYQDNKWPSGIPERFSGSNSGNTATLTISGTQAMDEADYYCQAWESSTVVFGGGTKLTVLG

SEQ ID NO: 611 - protein, 107 aa, artificial
  23A10.3 (1-231)(C42Y) VL
SYELTQPPSVSVSPGQTASITCSGDRLGEKYVYWYQQKPGQSPILVIYQDNKWPSGIPERFSGSNSGNTATLTISGTQAMDEADYYCQAWDSSTVVFGGGTKLTVLG

SEQ ID NO: 612 - protein, 109 aa, artificial
  25G10.1 (1-235)(H105Y) VL
EIVLTQSPGTLSLSPGERATLSCRASQSVSSSYLAWYQQKPGQAPRLLIFGASSRATGIPDRFSGSGSGTDFTLTISRLEPEDFAVYYCQQYGNSPLTFGGGTKVEIKR

SEQ ID NO: 613 - protein, 109 aa, artificial; identical to SEQ ID NO: 612
  25G10.1 (1-235)(H105Y) VL

SEQ ID NO: 614 - protein, 111 aa, artificial
  26D1.1 (1-235)(S7P) VL
HSVLTQPPSASGTPGQRVTISCSGSRSNIGSNFVNWYQQLPGTAPKLLIYTNNQRPSGVPDRFSGSKSGTSASLAISGLQSEDEADYYCAVWDDSLNGWVFGGGTKLTVLG

SEQ ID NO: 615 - protein, 111 aa, artificial
  26D1.1 (1-235)(H1Q,S7P) VL
QSVLTQPPSASGTPGQRVTISCSGSRSNIGSNFVNWYQQLPGTAPKLLIYTNNQRPSGVPDRFSGSKSGTSASLAISGLQSEDEADYYCAVWDDSLNGWVFGGGTKLTVLG

SEQ ID NO: 616 - protein, 111 aa, artificial
  26D1.1 (1-235)(H1Q,S7P,W109Y) VL
QSVLTQPPSASGTPGQRVTISCSGSRSNIGSNFVNWYQQLPGTAPKLLIYTNNQRPSGVPDRFSGSKSGTSASLAISGLQSEDEADYYCAVYDDSLNGWVFGGGTKLTVLG

SEQ ID NO: 617 - protein, 111 aa, artificial
  26D1.1 (1-235)(H1Q,S7P,W109Y,D111E,N135Q) VL
QSVLTQPPSASGTPGQRVTISCSGSRSNIGSNFVNWYQQLPGTAPKLLIYTNNQRPSGVPDRFSGSKSGTSASLAISGLQSEDEADYYCAVYDESLQGWVFGGGTKLTVLG

SEQ ID NO: 618 - protein, 111 aa, artificial; identical to SEQ ID NO: 617
  26D1.1 (1-235)(H1Q,S7P,W109Y,D111E,N135Q) VL

SEQ ID NO: 619 - protein, 111 aa, artificial; identical to SEQ ID NO: 615
  26D1.1 (1-235)(H1Q,S7P) VL

SEQ ID NO: 620 - protein, 111 aa, artificial
  26F12.1 (1-235)(S7P) VL
QSVLTQPPSASGTPGQKVTISCSGSRSNIGSNFVNWYQQLPGTAPKLLIYTNYQRPSGVPDRFSGSKSGTSASLAISGLQSEDEADYYCAVWDDSLNGWVFGGGTKLTVLG

SEQ ID NO: 621 - protein, 111 aa, artificial
  26F12.1 (1-235)(S7P,D111E) VL
QSVLTQPPSASGTPGQKVTISCSGSRSNIGSNFVNWYQQLPGTAPKLLIYTNYQRPSGVPDRFSGSKSGTSASLAISGLQSEDEADYYCAVWDESLNGWVFGGGTKLTVLG

SEQ ID NO: 622 - protein, 111 aa, artificial; identical to SEQ ID NO: 621
  26F12.1 (1-235)(S7P,D111E) VL

SEQ ID NO: 623 - protein, 111 aa, artificial
  26F12.1 (1-235)(S7P,W109Y,D111E,N135Q) VL
QSVLTQPPSASGTPGQKVTISCSGSRSNIGSNFVNWYQQLPGTAPKLLIYTNYQRPSGVPDRFSGSKSGTSASLAISGLQSEDEADYYCAVYDESLQGWVFGGGTKLTVLG

SEQ ID NO: 624 - protein, 111 aa, artificial
  25F8.1 (1-235)(K45Q) VL
QSALTQPPSATGTPGQRVTISCSGSSSNIGRNFVNWYQQLPGTAPKVLIYTNNQRPSGVPDRFSGSKSGTSASLAISGLQSEDESDYYCAAWDDSLNGWVFGGGTKLTVLG

SEQ ID NO: 625 - protein, 111 aa, artificial
  25F8.1 (1-235)(K45Q,S102A) VL
QSALTQPPSATGTPGQRVTISCSGSSSNIGRNFVNWYQQLPGTAPKVLIYTNNQRPSGVPDRFSGSKSGTSASLAISGLQSEDEADYYCAAWDDSLNGWVFGGGTKLTVLG

SEQ ID NO: 626 - protein, 111 aa, artificial; identical to SEQ ID NO: 625
  25F8.1 (1-235)(K45Q,S102A) VL

SEQ ID NO: 627 - protein, 111 aa, artificial
  25F8.1 (1-235)(K45Q,S102A,D111E) VL
QSALTQPPSATGTPGQRVTISCSGSSSNIGRNFVNWYQQLPGTAPKVLIYTNNQRPSGVPDRFSGSKSGTSASLAISGLQSEDEADYYCAAWDESLNGWVFGGGTKLTVLG

SEQ ID NO: 628 - protein, 111 aa, artificial
  25F8.1 (1-235)(K45Q,S102A,D111E,N135Q) VL
QSALTQPPSATGTPGQRVTISCSGSSSNIGRNFVNWYQQLPGTAPKVLIYTNNQRPSGVPDRFSGSKSGTSASLAISGLQSEDEADYYCAAWDESLQGWVFGGGTKLTVLG

SEQ ID NO: 629 - protein, 111 aa, artificial
  22D1.1 (1-235)(K45Q,S102A) VL
QSALTQPPSATGTPGQRVTISCSGSSSNIGSNFVNWYQQLPGTAPKVLIYTNNQRPSGVPDRFSGSKSGTSASLAISGLQSEDEADYYCATWDDSMNGWVFGGGTKLTVLG

SEQ ID NO: 630 - protein, 111 aa, artificial
  22D1.1 (1-235)(K45Q,S102A,D111E,N135Q) VL
QSALTQPPSATGTPGQRVTISCSGSSSNIGSNFVNWYQQLPGTAPKVLIYTNNQRPSGVPDRFSGSKSGTSASLAISGLQSEDEADYYCATWDESMQGWVFGGGTKLTVLG

SEQ ID NO: 631 - protein, 111 aa, artificial
  22D1.1 (1-235)(K45Q,S102A,W109Y,D111E,N135Q) VL
QSALTQPPSATGTPGQRVTISCSGSSSNIGSNFVNWYQQLPGTAPKVLIYTNNQRPSGVPDRFSGSKSGTSASLAISGLQSEDEADYYCATYDESMQGWVFGGGTKLTVLG

SEQ ID NO: 632 - protein, 111 aa, artificial
  22D1.1 (1-235)(K45Q,S102A,W109Y) VL
QSALTQPPSATGTPGQRVTISCSGSSSNIGSNFVNWYQQLPGTAPKVLIYTNNQRPSGVPDRFSGSKSGTSASLAISGLQSEDEADYYCATYDDSMNGWVFGGGTKLTVLG

SEQ ID NO: 633 - protein, 111 aa, artificial; identical to SEQ ID NO: 629
  22D1.1 (1-235)(K45Q,S102A) VL

SEQ ID NO: 634 - protein, 112 aa, artificial; identical to SEQ ID NO: 420
  4F7 VL

SEQ ID NO: 635 - protein, 107 aa, artificial
  2G6 (1-234)(D110E) VL
SYELTQPPSVSVSPGQTASITCSGDRLGEKYTCWYQQRPGQSPLLVIYQDTKRPSGIPERFSGSNSGNTATLTISGTQAMDEADYYCQAWESSTVVFGGGTKLTVLG

SEQ ID NO: 636 - protein, 107 aa, artificial; identical to SEQ ID NO: 570
  2G6 (1-234)(C42S,D110E) VL

SEQ ID NO: 637 - protein, 107 aa, artificial; identical to SEQ ID NO: 570
  2G6 (1-234)(C42S,D110E) VL

SEQ ID NO: 638 - protein, 107 aa, artificial; identical to SEQ ID NO: 608
  23A10.3 (1-231)(C42S) VL

SEQ ID NO: 639 - DNA, 1368 bp, artificial
  2G6 HC
caggtgcagttggtggagtctgggggaggcgtggtccagcctgggaggtccctgagactctcctgtgcagcgtctggattcaccttcagtagctatggcatgcactgggtccgccaggctccaggcaaggggctggagtgggtggcatttatatggtatgatggaagtaataaatactatgcagactccgtgaaggaccgattcaccatctccagagacaattccaagaacacgctgtatctgcaaatgaaaagcctgagagctgaggacacggctgtgtattactgtgcgagaagggccggtataataggaactataggctactactacggtatggacgtctggggccaagggaccacggtcaccgtctctagtgcctccaccaagggcccatcggtcttccccctggcaccctcctccaagagcacctctgggggcacagcggccctgggctgcctggtcaaggactacttccccgaaccggtgacggtgtcgtggaactcaggcgccctgaccagcggcgtgcacaccttcccggctgtcctacagtcctcaggactctactccctcagcagcgtggtgaccgtgccctccagcagcttgggcacccagacctacatctgcaacgtgaatcacaagcccagcaacaccaaggtggacaagaaagttgagcccaaatcttgtgacaaaactcacacatgcccaccgtgcccagcacctgaactcctggggggaccgtcagtcttcctcttccccccaaaacccaaggacaccctcatgatctcccggacccctgaggtcacatgcgtggtggtggacgtgagccacgaagaccctgaggtcaagttcaactggtacgtggacggcgtggaggtgcataatgccaagacaaagccgcgggaggagcagtacaacagcacgtaccgtgtggtcagcgtcctcaccgtcctgcaccaggactggctgaatggcaaggagtacaagtgcaaggtctccaacaaagccctcccagcccccatcgagaaaaccatctccaaagccaaagggcagccccgagaaccacaggtgtacaccctgcccccatcccgggaggagatgaccaagaaccaggtcagcctgacctgcctggtcaaaggcttctatcccagcgacatcgccgtggagtgggagagcaatgggcagccggagaacaactacaagaccacgcctcccgtgctggactccgacggctccttcttcctctatagcaagctcaccgtggacaagagcaggtggcagcaggggaacgtcttctcatgctccgtgatgcatgaggctctgcacaaccactacacgcagaagagcctctccctgtctccgggtaaatga

SEQ ID NO: 640 - protein, 455 aa, artificial
  2G6 HC
QVQLVESGGGVVQPGRSLRLSCAASGFTFSSYGMHWVRQAPGKGLEWVAFIWYDGSNKYYADSVKDRFTISRDNSKNTLYLQMKSLRAEDTAVYYCARRAGIIGTIGYYYGMDVWGQGTTVTVSSASTKGPSVFPLAPSSKSTSGGTAALGCLVKDYFPEPVTVSWNSGALTSGVHTFPAVLQSSGLYSLSSVVTVPSSSLGTQTYICNVNHKPSNTKVDKKVEPKSCDKTHTCPPCPAPELLGGPSVFLFPPKPKDTLMISRTPEVTCVVVDVSHEDPEVKFNWYVDGVEVHNAKTKPREEQYNSTYRVVSVLTVLHQDWLNGKEYKCKVSNKALPAPIEKTISKAKGQPREPQVYTLPPSREEMTKNQVSLTCLVKGFYPSDIAVEWESNGQPENNYKTTPPVLDSDGSFFLYSKLTVDKSRWQQGNVFSCSVMHEALHNHYTQKSLSLSPGK

SEQ ID NO: 641 - DNA, 1353 bp, artificial
  4A2 HC
caggtgcagctgcaggagtcgggcccaggactggtgaagccttcacagaccctgtccctcacctgcactgtctctggtggctccatcagcagtagtggttactactggagctggatccgccagcacccagggaagggcctggagtggattgggtacatctattacactgggagcgcctactacaacccgtccctcaagagtcgagttaccatatcagtagacacgtctaagaaccagttctccctgaagctgagctctgtgactgccgcggacacggccgtgtattactgtgcgagagatggaagcagtggctggtacttccagtattggggccagggcaccctggtcaccgtctctagtgcctccaccaagggcccatcggtcttccccctggcaccctcctccaagagcacctctgggggcacagcggccctgggctgcctggtcaaggactacttccccgaaccggtgacggtgtcgtggaactcaggcgccctgaccagcggcgtgcacaccttcccggctgtcctacagtcctcaggactctactccctcagcagcgtggtgaccgtgccctccagcagcttgggcacccagacctacatctgcaacgtgaatcacaagcccagcaacaccaaggtggacaagaaagttgagcccaaatcttgtgacaaaactcacacatgcccaccgtgcccagcacctgaactcctggggggaccgtcagtcttcctcttccccccaaaacccaaggacaccctcatgatctcccggacccctgaggtcacatgcgtggtggtggacgtgagccacgaagaccctgaggtcaagttcaactggtacgtggacggcgtggaggtgcataatgccaagacaaagccgcgggaggagcagtacaacagcacgtaccgtgtggtcagcgtcctcaccgtcctgcaccaggactggctgaatggcaaggagtacaagtgcaaggtctccaacaaagccctcccagcccccatcgagaaaaccatctccaaagccaaagggcagccccgagaaccacaggtgtacaccctgcccccatcccgggaggagatgaccaagaaccaggtcagcctgacctgcctggtcaaaggcttctatcccagcgacatcgccgtggagtgggagagcaatgggcagccggagaacaactacaagaccacgcctcccgtgctggactccgacggctccttcttcctctatagcaagctcaccgtggacaagagcaggtggcagcaggggaacgtcttctcatgctccgtgatgcatgaggctctgcacaaccactacacgcagaagagcctctccctgtctccgggtaaatga

SEQ ID NO: 642 - protein, 450 aa, artificial
  4A2 HC
QVQLQESGPGLVKPSQTLSLTCTVSGGSISSSGYYWSWIRQHPGKGLEWIGYIYYTGSAYYNPSLKSRVTISVDTSKNQFSLKLSSVTAADTAVYYCARDGSSGWYFQYWGQGTLVTVSSASTKGPSVFPLAPSSKSTSGGTAALGCLVKDYFPEPVTVSWNSGALTSGVHTFPAVLQSSGLYSLSSVVTVPSSSLGTQTYICNVNHKPSNTKVDKKVEPKSCDKTHTCPPCPAPELLGGPSVFLFPPKPKDTLMISRTPEVTCVVVDVSHEDPEVKFNWYVDGVEVHNAKTKPREEQYNSTYRVVSVLTVLHQDWLNGKEYKCKVSNKALPAPIEKTISKAKGQPREPQVYTLPPSREEMTKNQVSLTCLVKGFYPSDIAVEWESNGQPENNYKTTPPVLDSDGSFFLYSKLTVDKSRWQQGNVFSCSVMHEALHNHYTQKSLSLSPGK

SEQ ID NO: 643 - DNA, 1341 bp, artificial
  4A9 HC
caggtgcagctgcaggagtcgggcccaggactggtgaagccttcggagaccctgtccctcacctgcactgtctctggtggctccatcagtggttactactggagctggatccggcagcccccaggaaagggactggagtggtttgcatatttctcttacagtgggagcaccaactacaacccctccctcaagagtcgagtcaccttatcagtagacacgtccaagaaccagttctccctgaagctgagctctgtgaccgctgcggacacggccgtgtattactgtgcgaggaactgggccttccactttgacttctggggccagggaaccctggtcaccgtctctagtgcctccaccaagggcccatcggtcttccccctggcaccctcctccaagagcacctctgggggcacagcggccctgggctgcctggtcaaggactacttccccgaaccggtgacggtgtcgtggaactcaggcgccctgaccagcggcgtgcacaccttcccggctgtcctacagtcctcaggactctactccctcagcagcgtggtgaccgtgccctccagcagcttgggcacccagacctacatctgcaacgtgaatcacaagcccagcaacaccaaggtggacaagaaagttgagcccaaatcttgtgacaaaactcacacatgcccaccgtgcccagcacctgaactcctggggggaccgtcagtcttcctcttccccccaaaacccaaggacaccctcatgatctcccggacccctgaggtcacatgcgtggtggtggacgtgagccacgaagaccctgaggtcaagttcaactggtacgtggacggcgtggaggtgcataatgccaagacaaagccgcgggaggagcagtacaacagcacgtaccgtgtggtcagcgtcctcaccgtcctgcaccaggactggctgaatggcaaggagtacaagtgcaaggtctccaacaaagccctcccagcccccatcgagaaaaccatctccaaagccaaagggcagccccgagaaccacaggtgtacaccctgcccccatcccgggaggagatgaccaagaaccaggtcagcctgacctgcctggtcaaaggcttctatcccagcgacatcgccgtggagtgggagagcaatgggcagccggagaacaactacaagaccacgcctcccgtgctggactccgacggctccttcttcctctatagcaagctcaccgtggacaagagcaggtggcagcaggggaacgtcttctcatgctccgtgatgcatgaggctctgcacaaccactacacgcagaagagcctctccctgtctccgggtaaatga

SEQ ID NO: 644 - protein, 446 aa, artificial
  4A9 HC
QVQLQESGPGLVKPSETLSLTCTVSGGSISGYYWSWIRQPPGKGLEWFAYFSYSGSTNYNPSLKSRVTLSVDTSKNQFSLKLSSVTAADTAVYYCARNWAFHFDFWGQGTLVTVSSASTKGPSVFPLAPSSKSTSGGTAALGCLVKDYFPEPVTVSWNSGALTSGVHTFPAVLQSSGLYSLSSVVTVPSSSLGTQTYICNVNHKPSNTKVDKKVEPKSCDKTHTCPPCPAPELLGGPSVFLFPPKPKDTLMISRTPEVTCVVVDVSHEDPEVKFNWYVDGVEVHNAKTKPREEQYNSTYRVVSVLTVLHQDWLNGKEYKCKVSNKALPAPIEKTISKAKGQPREPQVYTLPPSREEMTKNQVSLTCLVKGFYPSDIAVEWESNGQPENNYKTTPPVLDSDGSFFLYSKLTVDKSRWQQGNVFSCSVMHEALHNHYTQKSLSLSPGK

SEQ ID NO: 645 - DNA, 1350 bp, artificial
  4B10 HC
caggtgcagctggtggagtctgggggaggcgtggtccagcctgggaggtccctgagactctcctgtgcagcctctggattcaccttcagtagctatgacatgcactgggtccgccaggctccaggcaaggggctggagtgggtggcagttatatcatatgatggaactaatgaatactatgcagactccgtgaagggccgattcaccatctccagagacacttccaagaacacgctgtatttgcaaatgaacagcctgagagctgaggacacggctgtatattactgtgcgagagaacgatattttgactggtcttttgactactggggccagggaaccctggtcagcgtctctagtgcctccaccaagggcccatcggtcttccccctggcaccctcctccaagagcacctctgggggcacagcggccctgggctgcctggtcaaggactacttccccgaaccggtgacggtgtcgtggaactcaggcgccctgaccagcggcgtgcacaccttcccggctgtcctacagtcctcaggactctactccctcagcagcgtggtgaccgtgccctccagcagcttgggcacccagacctacatctgcaacgtgaatcacaagcccagcaacaccaaggtggacaagaaagttgagcccaaatcttgtgacaaaactcacacatgcccaccgtgcccagcacctgaactcctggggggaccgtcagtcttcctcttccccccaaaacccaaggacaccctcatgatctcccggacccctgaggtcacatgcgtggtggtggacgtgagccacgaagaccctgaggtcaagttcaactggtacgtggacggcgtggaggtgcataatgccaagacaaagccgcgggaggagcagtacaacagcacgtaccgtgtggtcagcgtcctcaccgtcctgcaccaggactggctgaatggcaaggagtacaagtgcaaggtctccaacaaagccctcccagcccccatcgagaaaaccatctccaaagccaaagggcagccccgagaaccacaggtgtacaccctgcccccatcccgggaggagatgaccaagaaccaggtcagcctgacctgcctggtcaaaggcttctatcccagcgacatcgccgtggagtgggagagcaatgggcagccggagaacaactacaagaccacgcctcccgtgctggactccgacggctccttcttcctctatagcaagctcaccgtggacaagagcaggtggcagcaggggaacgtcttctcatgctccgtgatgcatgaggctctgcacaaccactacacgcagaagagcctctccctgtctccgggtaaatga

SEQ ID NO: 646 - protein, 449 aa, artificial
  4B10 HC
QVQLVESGGGVVQPGRSLRLSCAASGFTFSSYDMHWVRQAPGKGLEWVAVISYDGTNEYYADSVKGRFTISRDTSKNTLYLQMNSLRAEDTAVYYCARERYFDWSFDYWGQGTLVSVSSASTKGPSVFPLAPSSKSTSGGTAALGCLVKDYFPEPVTVSWNSGALTSGVHTFPAVLQSSGLYSLSSVVTVPSSSLGTQTYICNVNHKPSNTKVDKKVEPKSCDKTHTCPPCPAPELLGGPSVFLFPPKPKDTLMISRTPEVTCVVVDVSHEDPEVKFNWYVDGVEVHNAKTKPREEQYNSTYRVVSVLTVLHQDWLNGKEYKCKVSNKALPAPIEKTISKAKGQPREPQVYTLPPSREEMTKNQVSLTCLVKGFYPSDIAVEWESNGQPENNYKTTPPVLDSDGSFFLYSKLTVDKSRWQQGNVFSCSVMHEALHNHYTQKSLSLSPGK

SEQ ID NO: 647 - DNA, 1350 bp, artificial
  4F3 HC
caggtgcagctggtggagtctgggggaggcgtggtccagcctgggaggtccctgagactctcctgtgcagcgtctggattctccttcagtagctatgacatggactgggtccgccagactccaggcaaggggctggagtgggtggcagttatatggtatgatggaagtaataaatactatgcagactccgtgaggggccgattcaccatctccagagacaattccaagaacacgctgtttctgcaaatgaacagcctgagagtcgaggacacggctgtgtattactgtgcgagagaaactggggagggctggtacttcgatctctggggccgtggcaccctggtcaccgtctctagtgcctccaccaagggcccatcggtcttccccctggcaccctcctccaagagcacctctgggggcacagcggccctgggctgcctggtcaaggactacttccccgaaccggtgacggtgtcgtggaactcaggcgccctgaccagcggcgtgcacaccttcccggctgtcctacagtcctcaggactctactccctcagcagcgtggtgaccgtgccctccagcagcttgggcacccagacctacatctgcaacgtgaatcacaagcccagcaacaccaaggtggacaagaaagttgagcccaaatcttgtgacaaaactcacacatgcccaccgtgcccagcacctgaactcctggggggaccgtcagtcttcctcttccccccaaaacccaaggacaccctcatgatctcccggacccctgaggtcacatgcgtggtggtggacgtgagccacgaagaccctgaggtcaagttcaactggtacgtggacggcgtggaggtgcataatgccaagacaaagccgcgggaggagcagtacaacagcacgtaccgtgtggtcagcgtcctcaccgtcctgcaccaggactggctgaatggcaaggagtacaagtgcaaggtctccaacaaagccctcccagcccccatcgagaaaaccatctccaaagccaaagggcagccccgagaaccacaggtgtacaccctgcccccatcccgggaggagatgaccaagaaccaggtcagcctgacctgcctggtcaaaggcttctatcccagcgacatcgccgtggagtgggagagcaatgggcagccggagaacaactacaagaccacgcctcccgtgctggactccgacggctccttcttcctctatagcaagctcaccgtggacaagagcaggtggcagcaggggaacgtcttctcatgctccgtgatgcatgaggctctgcacaaccactacacgcagaagagcctctccctgtctccgggtaaatga

SEQ ID NO: 648 - protein, 449 aa, artificial
  4F3 HC
QVQLVESGGGVVQPGRSLRLSCAASGFSFSSYDMDWVRQTPGKGLEWVAVIWYDGSNKYYADSVRGRFTISRDNSKNTLFLQMNSLRVEDTAVYYCARETGEGWYFDLWGRGTLVTVSSASTKGPSVFPLAPSSKSTSGGTAALGCLVKDYFPEPVTVSWNSGALTSGVHTFPAVLQSSGLYSLSSVVTVPSSSLGTQTYICNVNHKPSNTKVDKKVEPKSCDKTHTCPPCPAPELLGGPSVFLFPPKPKDTLMISRTPEVTCVVVDVSHEDPEVKFNWYVDGVEVHNAKTKPREEQYNSTYRVVSVLTVLHQDWLNGKEYKCKVSNKALPAPIEKTISKAKGQPREPQVYTLPPSREEMTKNQVSLTCLVKGFYPSDIAVEWESNGQPENNYKTTPPVLDSDGSFFLYSKLTVDKSRWQQGNVFSCSVMHEALHNHYTQKSLSLSPGK

SEQ ID NO: 649 - DNA, 1341 bp, artificial
  4F7 HC
caggtgcagctgcaggagtcgggcccaggactggtgaagccttcggagaccctgtccctcacctgcactgtctctggtggctccatcagtagttactcctggagctggatccggcagcccccagggaagggactggagtggattgggtatatctattacagtgggagcaccaactacaacccctccctcaagagtcgagtcaccatatcattagacacgtccaagaaccagttctccctgaagctgagctctgtgaccgctgcggacacggccgtgtattactgtgcgaggaactgggccttccactttgactactggggccagggaaccctggtcaccgtctctagtgcctccaccaagggcccatcggtcttccccctggcaccctcctccaagagcacctctgggggcacagcggccctgggctgcctggtcaaggactacttccccgaaccggtgacggtgtcgtggaactcaggcgccctgaccagcggcgtgcacaccttcccggctgtcctacagtcctcaggactctactccctcagcagcgtggtgaccgtgccctccagcagcttgggcacccagacctacatctgcaacgtgaatcacaagcccagcaacaccaaggtggacaagaaagttgagcccaaatcttgtgacaaaactcacacatgcccaccgtgcccagcacctgaactcctggggggaccgtcagtcttcctcttccccccaaaacccaaggacaccctcatgatctcccggacccctgaggtcacatgcgtggtggtggacgtgagccacgaagaccctgaggtcaagttcaactggtacgtggacggcgtggaggtgcataatgccaagacaaagccgcgggaggagcagtacaacagcacgtaccgtgtggtcagcgtcctcaccgtcctgcaccaggactggctgaatggcaaggagtacaagtgcaaggtctccaacaaagccctcccagcccccatcgagaaaaccatctccaaagccaaagggcagccccgagaaccacaggtgtacaccctgcccccatcccgggaggagatgaccaagaaccaggtcagcctgacctgcctggtcaaaggcttctatcccagcgacatcgccgtggagtgggagagcaatgggcagccggagaacaactacaagaccacgcctcccgtgctggactccgacggctccttcttcctctatagcaagctcaccgtggacaagagcaggtggcagcaggggaacgtcttctcatgctccgtgatgcatgaggctctgcacaaccactacacgcagaagagcctctccctgtctccgggtaaatga

SEQ ID NO: 650 - protein, 446 aa, artificial
  HC
QVQLQESGPGLVKPSETLSLTCTVSGGSISSYSWSWIRQPPGKGLEWIGYIYYSGSTNYNPSLKSRVTISLDTSKNQFSLKLSSVTAADTAVYYCARNWAFHFDYWGQGTLVTVSSASTKGPSVFPLAPSSKSTSGGTAALGCLVKDYFPEPVTVSWNSGALTSGVHTFPAVLQSSGLYSLSSVVTVPSSSLGTQTYICNVNHKPSNTKVDKKVEPKSCDKTHTCPPCPAPELLGGPSVFLFPPKPKDTLMISRTPEVTCVVVDVSHEDPEVKFNWYVDGVEVHNAKTKPREEQYNSTYRVVSVLTVLHQDWLNGKEYKCKVSNKALPAPIEKTISKAKGQPREPQVYTLPPSREEMTKNQVSLTCLVKGFYPSDIAVEWESNGQPENNYKTTPPVLDSDGSFFLYSKLTVDKSRWQQGNVFSCSVMHEALHNHYTQKSLSLSPGK

SEQ ID NO: 651 - DNA, 1368 bp, artificial
  16A4 HC
caggtgcagctgcaggagtcgggcccaggactggcgaagccttcggagaccctgtccctcacctgcactgtctctggtgactccatcactagttactactggagctggatccggcagcccccagggaagggactggagtggattgggtatatctattacagcgggagcaccaattacaacccctccctcaagagtcgagtcaccatatcagtagacacgtccaagaaccagttctccctgaagctgagttctgtgaccgctgcggacacggccgtgtattactgtgcgagagatcaaaggcggatagcagcagctggtacccacttctacggtatggacgtctggggccaagggaccacggtcactgtctcctcagcttccaccaagggcccatccgtcttccccctggcgccctcctccaagagcacctctgggggcacagcggccctgggctgcctggtcaaggactacttccccgaaccggtgacggtgtcgtggaactcaggggccctgaccagcggcgtgcacaccttcccggctgtcctacagtcctcaggactctactccctcagcagcgtggtgaccgtgccctccagcagcttgggcacccagacctacatctgcaacgtgaatcacaagcccagcaacaccaaggtggacaagaaagttgagcccaaatcttgtgacaaaactcacacatgcccaccgtgcccagcacctgaactcctggggggaccgtcagtcttcctcttccccccaaaacccaaggacaccctcatgatctcccggacccctgaggtcacatgcgtggtggtggacgtgagccacgaagaccctgaggtcaagttcaactggtacgtggacggcgtggaggtgcataatgccaagacaaagccgcgggaggagcagtacaacagcacgtaccgtgtggtcagcgtcctcaccgtcctgcaccaggactggctgaatggcaaggagtacaagtgcaaggtctccaacaaagccctcccagcccccatcgagaaaaccatctccaaagccaaagggcagccccgagaaccacaggtgtacaccctgcccccatcccgggaggagatgaccaagaaccaggtcagcctgacctgcctggtcaaaggcttctatcccagcgacatcgccgtggagtgggagagcaatgggcagccggagaacaactacaagaccacgcctcccgtgctggactccgacggctccttcttcctctatagcaagctcaccgtggacaagagcaggtggcagcaggggaacgtcttctcatgctccgtgatgcatgaggctctgcacaaccactacacgcagaagagcctctccctgtctccgggtaaatga

SEQ ID NO: 652 - protein, 455 aa, artificial
  16A4 HC
QVQLQESGPGLAKPSETLSLTCTVSGDSITSYYWSWIRQPPGKGLEWIGYIYYSGSTNYNPSLKSRVTISVDTSKNQFSLKLSSVTAADTAVYYCARDQRRIAAAGTHFYGMDVWGQGTTVTVSSASTKGPSVFPLAPSSKSTSGGTAALGCLVKDYFPEPVTVSWNSGALTSGVHTFPAVLQSSGLYSLSSVVTVPSSSLGTQTYICNVNHKPSNTKVDKKVEPKSCDKTHTCPPCPAPELLGGPSVFLFPPKPKDTLMISRTPEVTCVVVDVSHEDPEVKFNWYVDGVEVHNAKTKPREEQYNSTYRVVSVLTVLHQDWLNGKEYKCKVSNKALPAPIEKTISKAKGQPREPQVYTLPPSREEMTKNQVSLTCLVKGFYPSDIAVEWESNGQPENNYKTTPPVLDSDGSFFLYSKLTVDKSRWQQGNVFSCSVMHEALHNHYTQKSLSLSPGK

SEQ ID NO: 653 - DNA, 1353 bp, artificial
  16C1 HC
caggtgcagctgcaggagtcgggcccaggactggtgaagccttcggagaccctgtccctcacttgtactgtctctggtggctccatcagtggttactactggagctggatccggcagcccccagggaagggactggagtggattgggtatatctattacattgggagcaccaactacaacccctccctcaagagtcgagtcaccatgtcaatagacacgtccaagaaccagttctccctgacgctgagctctttgaccgctgcggacacggccgtgtatttctgtgcgagagatgggagcagtggctggtaccggtggttcgacccctggggccagggaaccctggtcaccgtctcctcagcttccaccaagggcccatccgtcttccccctggcgccctcctccaagagcacctctgggggcacagcggccctgggctgcctggtcaaggactacttccccgaaccggtgacggtgtcgtggaactcaggggccctgaccagcggcgtgcacaccttcccggctgtcctacagtcctcaggactctactccctcagcagcgtggtgaccgtgccctccagcagcttgggcacccagacctacatctgcaacgtgaatcacaagcccagcaacaccaaggtggacaagaaagttgagcccaaatcttgtgacaaaactcacacatgcccaccgtgcccagcacctgaactcctggggggaccgtcagtcttcctcttccccccaaaacccaaggacaccctcatgatctcccggacccctgaggtcacatgcgtggtggtggacgtgagccacgaagaccctgaggtcaagttcaactggtacgtggacggcgtggaggtgcataatgccaagacaaagccgcgggaggagcagtacaacagcacgtaccgtgtggtcagcgtcctcaccgtcctgcaccaggactggctgaatggcaaggagtacaagtgcaaggtctccaacaaagccctcccagcccccatcgagaaaaccatctccaaagccaaagggcagccccgagaaccacaggtgtacaccctgcccccatcccgggaggagatgaccaagaaccaggtcagcctgacctgcctggtcaaaggcttctatcccagcgacatcgccgtggagtgggagagcaatgggcagccggagaacaactacaagaccacgcctcccgtgctggactccgacggctccttcttcctctatagcaagctcaccgtggacaagagcaggtggcagcaggggaacgtcttctcatgctccgtgatgcatgaggctctgcacaaccactacacgcagaagagcctctccctgtctccgggtaaatga

SEQ ID NO: 654 - protein, 450 aa, artificial
  16C1 HC
QVQLQESGPGLVKPSETLSLTCTVSGGSISGYYWSWIRQPPGKGLEWIGYIYYIGSTNYNPSLKSRVTMSIDTSKNQFSLTLSSLTAADTAVYFCARDGSSGWYRWFDPWGQGTLVTVSSASTKGPSVFPLAPSSKSTSGGTAALGCLVKDYFPEPVTVSWNSGALTSGVHTFPAVLQSSGLYSLSSVVTVPSSSLGTQTYICNVNHKPSNTKVDKKVEPKSCDKTHTCPPCPAPELLGGPSVFLFPPKPKDTLMISRTPEVTCVVVDVSHEDPEVKFNWYVDGVEVHNAKTKPREEQYNSTYRVVSVLTVLHQDWLNGKEYKCKVSNKALPAPIEKTISKAKGQPREPQVYTLPPSREEMTKNQVSLTCLVKGFYPSDIAVEWESNGQPENNYKTTPPVLDSDGSFFLYSKLTVDKSRWQQGNVFSCSVMHEALHNHYTQKSLSLSPGK

SEQ ID NO: 655 - DNA, 1359 bp, artificial
  17H8 HC
caggtgcagctgcaggagtcgggcccaggactggtgaagccttcggagaccctgtccctcacgtgcactgtctctggtggctccatcaatagttactactggagctggatccggcagcccccagggaagggactggagtggattgggtatatctattacattgggagcaccaactacaacccctccctcaagagtcgcgtcaccatatcagtagacacgtccaagaaccagttctccctgaagctgagctctgtgaccgctgcggacacggccctgtattactgtgcgagagattcccggtatagaagtggctggtacgatgcttttgatatctggggccaagggacaatggtcaccgtctcttcagcttccaccaagggcccatccgtcttccccctggcgccctcctccaagagcacctctgggggcacagcggccctgggctgcctggtcaaggactacttccccgaaccggtgacggtgtcgtggaactcaggggccctgaccagcggcgtgcacaccttcccggctgtcctacagtcctcaggactctactccctcagcagcgtggtgaccgtgccctccagcagcttgggcacccagacctacatctgcaacgtgaatcacaagcccagcaacaccaaggtggacaagaaagttgagcccaaatcttgtgacaaaactcacacatgcccaccgtgcccagcacctgaactcctggggggaccgtcagtcttcctcttccccccaaaacccaaggacaccctcatgatctcccggacccctgaggtcacatgcgtggtggtggacgtgagccacgaagaccctgaggtcaagttcaactggtacgtggacggcgtggaggtgcataatgccaagacaaagccgcgggaggagcagtacaacagcacgtaccgtgtggtcagcgtcctcaccgtcctgcaccaggactggctgaatggcaaggagtacaagtgcaaggtctccaacaaagccctcccagcccccatcgagaaaaccatctccaaagccaaagggcagccccgagaaccacaggtgtacaccctgcccccatcccgggaggagatgaccaagaaccaggtcagcctgacctgcctggtcaaaggcttctatcccagcgacatcgccgtggagtgggagagcaatgggcagccggagaacaactacaagaccacgcctcccgtgctggactccgacggctccttcttcctctatagcaagctcaccgtggacaagagcaggtggcagcaggggaacgtcttctcatgctccgtgatgcatgaggctctgcacaaccactacacgcagaagagcctctccctgtctccgggtaaatga

SEQ ID NO: 656 - protein, 452 aa, artificial
  17H8 HC
QVQLQESGPGLVKPSETLSLTCTVSGGSINSYYWSWIRQPPGKGLEWIGYIYYIGSTNYNPSLKSRVTISVDTSKNQFSLKLSSVTAADTALYYCARDSRYRSGWYDAFDIWGQGTMVTVSSASTKGPSVFPLAPSSKSTSGGTAALGCLVKDYFPEPVTVSWNSGALTSGVHTFPAVLQSSGLYSLSSVVTVPSSSLGTQTYICNVNHKPSNTKVDKKVEPKSCDKTHTCPPCPAPELLGGPSVFLFPPKPKDTLMISRTPEVTCVVVDVSHEDPEVKFNWYVDGVEVHNAKTKPREEQYNSTYRVVSVLTVLHQDWLNGKEYKCKVSNKALPAPIEKTISKAKGQPREPQVYTLPPSREEMTKNQVSLTCLVKGFYPSDIAVEWESNGQPENNYKTTPPVLDSDGSFFLYSKLTVDKSRWQQGNVFSCSVMHEALHNHYTQKSLSLSPGK

SEQ ID NO: 657 - DNA, 1353 bp, artificial
  19B5 HC
caggtgcagttggtgcagtctggggctgaggtgaagaagcctggggcctcagtgaaggtttcctgcaaggtttctggatacaccttcaccagctactttattcactgggtgcgccaggcccctggacaagggcttgaatggatgggaattatcaaccctattagtgttagcacaagctacgcacagaagttccagggcagagtcaccatgaccagggacacgtccacgagcacagtcttcatggagctgagcagcctgagatctgaggacacggccgtgtattactgtgcgcgaggggggatacagctatggttacatttggactactggggccagggaaccctggtcaccgtctcctcagcttccaccaagggcccatccgtcttccccctggcgccctcctccaagagcacctctgggggcacagcggccctgggctgcctggtcaaggactacttccccgaaccggtgacggtgtcgtggaactcaggggccctgaccagcggcgtgcacaccttcccggctgtcctacagtcctcaggactctactccctcagcagcgtggtgaccgtgccctccagcagcttgggcacccagacctacatctgcaacgtgaatcacaagcccagcaacaccaaggtggacaagaaagttgagcccaaatcttgtgacaaaactcacacatgcccaccgtgcccagcacctgaactcctggggggaccgtcagtcttcctcttccccccaaaacccaaggacaccctcatgatctcccggacccctgaggtcacatgcgtggtggtggacgtgagccacgaagaccctgaggtcaagttcaactggtacgtggacggcgtggaggtgcataatgccaagacaaagccgcgggaggagcagtacaacagcacgtaccgtgtggtcagcgtcctcaccgtcctgcaccaggactggctgaatggcaaggagtacaagtgcaaggtctccaacaaagccctcccagcccccatcgagaaaaccatctccaaagccaaagggcagccccgagaaccacaggtgtacaccctgcccccatcccgggaggagatgaccaagaaccaggtcagcctgacctgcctggtcaaaggcttctatcccagcgacatcgccgtggagtgggagagcaatgggcagccggagaacaactacaagaccacgcctcccgtgctggactccgacggctccttcttcctctatagcaagctcaccgtggacaagagcaggtggcagcaggggaacgtcttctcatgctccgtgatgcatgaggctctgcacaaccactacacgcagaagagcctctccctgtctccgggtaaatga

SEQ ID NO: 658 - protein, 450 aa, artificial
  19B5 HC
QVQLVQSGAEVKKPGASVKVSCKVSGYTFTSYFIHWVRQAPGQGLEWMGIINPISVSTSYAQKFQGRVTMTRDTSTSTVFMELSSLRSEDTAVYYCARGGIQLWLHLDYWGQGTLVTVSSASTKGPSVFPLAPSSKSTSGGTAALGCLVKDYFPEPVTVSWNSGALTSGVHTFPAVLQSSGLYSLSSVVTVPSSSLGTQTYICNVNHKPSNTKVDKKVEPKSCDKTHTCPPCPAPELLGGPSVFLFPPKPKDTLMISRTPEVTCVVVDVSHEDPEVKFNWYVDGVEVHNAKTKPREEQYNSTYRVVSVLTVLHQDWLNGKEYKCKVSNKALPAPIEKTISKAKGQPREPQVYTLPPSREEMTKNQVSLTCLVKGFYPSDIAVEWESNGQPENNYKTTPPVLDSDGSFFLYSKLTVDKSRWQQGNVFSCSVMHEALHNHYTQKSLSLSPGK

SEQ ID NO: 659 - DNA, 1353 bp, artificial
  20D3 HC
caggtgcagctggtgcagtctggggctgaggtgaagaagcctggggcctcagtgaaggtttcctgcaaggtttctggatacaccttcaccagctactttattcactgggtgcgccaggcccctggacaagggcttgagtggatgggaataatcaaccctattagtgttagcacaagctacgcacagaagttccagggcagagtcaccatgaccagggacacgtccacgagcacagtcttcatggagctgagcagcctgagatctgaggacacggccgtgtattactgtgcgcgaggggggatacagctatggttacattttgactactggggccagggaaccctggtcaccgtctcctcagcttccaccaagggcccatccgtcttccccctggcgccctcctccaagagcacctctgggggcacagcggccctgggctgcctggtcaaggactacttccccgaaccggtgacggtgtcgtggaactcaggggccctgaccagcggcgtgcacaccttcccggctgtcctacagtcctcaggactctactccctcagcagcgtggtgaccgtgccctccagcagcttgggcacccagacctacatctgcaacgtgaatcacaagcccagcaacaccaaggtggacaagaaagttgagcccaaatcttgtgacaaaactcacacatgcccaccgtgcccagcacctgaactcctggggggaccgtcagtcttcctcttccccccaaaacccaaggacaccctcatgatctcccggacccctgaggtcacatgcgtggtggtggacgtgagccacgaagaccctgaggtcaagttcaactggtacgtggacggcgtggaggtgcataatgccaagacaaagccgcgggaggagcagtacaacagcacgtaccgtgtggtcagcgtcctcaccgtcctgcaccaggactggctgaatggcaaggagtacaagtgcaaggtctccaacaaagccctcccagcccccatcgagaaaaccatctccaaagccaaagggcagccccgagaaccacaggtgtacaccctgcccccatcccgggaggagatgaccaagaaccaggtcagcctgacctgcctggtcaaaggcttctatcccagcgacatcgccgtggagtgggagagcaatgggcagccggagaacaactacaagaccacgcctcccgtgctggactccgacggctccttcttcctctatagcaagctcaccgtggacaagagcaggtggcagcaggggaacgtcttctcatgctccgtgatgcatgaggctctgcacaaccactacacgcagaagagcctctccctgtctccgggtaaatga

SEQ ID NO: 660 - protein, 450 aa, artificial
  20D3 HC
QVQLVQSGAEVKKPGASVKVSCKVSGYTFTSYFIHWVRQAPGQGLEWMGIINPISVSTSYAQKFQGRVTMTRDTSTSTVFMELSSLRSEDTAVYYCARGGIQLWLHFDYWGQGTLVTVSSASTKGPSVFPLAPSSKSTSGGTAALGCLVKDYFPEPVTVSWNSGALTSGVHTFPAVLQSSGLYSLSSVVTVPSSSLGTQTYICNVNHKPSNTKVDKKVEPKSCDKTHTCPPCPAPELLGGPSVFLFPPKPKDTLMISRTPEVTCVVVDVSHEDPEVKFNWYVDGVEVHNAKTKPREEQYNSTYRVVSVLTVLHQDWLNGKEYKCKVSNKALPAPIEKTISKAKGQPREPQVYTLPPSREEMTKNQVSLTCLVKGFYPSDIAVEWESNGQPENNYKTTPPVLDSDGSFFLYSKLTVDKSRWQQGNVFSCSVMHEALHNHYTQKSLSLSPGK

SEQ ID NO: 661 - DNA, 1353 bp, artificial
  22D1 HC
caggtgcagctggtgcagtctggggctgaggtgaagaagcctggggcctcagtgagggtttcctgcaaggtttctggatacaccttcaccagctactttattcactgggtacgccaggcccctggacaagggcttgagtggatgggaataatcaaccctattagtgttagcacaagctacgcacagaagttccagggcagagtcaccatgaccagggacacgtccacgagcacagtcttcatggagctgagcagcctgagatctgaggacacggccgtgtattactgtgcgcgaggggggatacagctatggttacatttggactactggggccagggaaccctggtcaccgtctcctcagcttccaccaagggcccatccgtcttccccctggcgccctcctccaagagcacctctgggggcacagcggccctgggctgcctggtcaaggactacttccccgaaccggtgacggtgtcgtggaactcaggggccctgaccagcggcgtgcacaccttcccggctgtcctacagtcctcaggactctactccctcagcagcgtggtgaccgtgccctccagcagcttgggcacccagacctacatctgcaacgtgaatcacaagcccagcaacaccaaggtggacaagaaagttgagcccaaatcttgtgacaaaactcacacatgcccaccgtgcccagcacctgaactcctggggggaccgtcagtcttcctcttccccccaaaacccaaggacaccctcatgatctcccggacccctgaggtcacatgcgtggtggtggacgtgagccacgaagaccctgaggtcaagttcaactggtacgtggacggcgtggaggtgcataatgccaagacaaagccgcgggaggagcagtacaacagcacgtaccgtgtggtcagcgtcctcaccgtcctgcaccaggactggctgaatggcaaggagtacaagtgcaaggtctccaacaaagccctcccagcccccatcgagaaaaccatctccaaagccaaagggcagccccgagaaccacaggtgtacaccctgcccccatcccgggaggagatgaccaagaaccaggtcagcctgacctgcctggtcaaaggcttctatcccagcgacatcgccgtggagtgggagagcaatgggcagccggagaacaactacaagaccacgcctcccgtgctggactccgacggctccttcttcctctatagcaagctcaccgtggacaagagcaggtggcagcaggggaacgtcttctcatgctccgtgatgcatgaggctctgcacaaccactacacgcagaagagcctctccctgtctccgggtaaatga

SEQ ID NO: 662 - protein, 450 aa, artificial
  22D1 HC
QVQLVQSGAEVKKPGASVRVSCKVSGYTFTSYFIHWVRQAPGQGLEWMGIINPISVSTSYAQKFQGRVTMTRDTSTSTVFMELSSLRSEDTAVYYCARGGIQLWLHLDYWGQGTLVTVSSASTKGPSVFPLAPSSKSTSGGTAALGCLVKDYFPEPVTVSWNSGALTSGVHTFPAVLQSSGLYSLSSVVTVPSSSLGTQTYICNVNHKPSNTKVDKKVEPKSCDKTHTCPPCPAPELLGGPSVFLFPPKPKDTLMISRTPEVTCVVVDVSHEDPEVKFNWYVDGVEVHNAKTKPREEQYNSTYRVVSVLTVLHQDWLNGKEYKCKVSNKALPAPIEKTISKAKGQPREPQVYTLPPSREEMTKNQVSLTCLVKGFYPSDIAVEWESNGQPENNYKTTPPVLDSDGSFFLYSKLTVDKSRWQQGNVFSCSVMHEALHNHYTQKSLSLSPGK

SEQ ID NO: 663 - DNA, 1356 bp, artificial
  22G10 HC
gaggtgcaactgttggagtctgggggaggcttggtacagcctggggggtccctgagactctcctgtgcagcctctggattcacctttagcagttatgccatgaactgggtccgccaggctccagggaaggggctggagtgggtctcaactattagtggtggtggtgctaacacatactacgcagactccgtgaagggccggttcaccatctccagtgacaattccaagagcacgctgtatctgcaaatgaacagcctgagagccgcggacacggccgtatatcactgtgcgaaagggggaatggggggatactactacggtatggacgtctggggccaagggaccacggtcaccgtctcctcagcttccaccaagggcccatccgtcttccccctggcgccctcctccaagagcacctctgggggcacagcggccctgggctgcctggtcaaggactacttccccgaaccggtgacggtgtcgtggaactcaggggccctgaccagcggcgtgcacaccttcccggctgtcctacagtcctcaggactctactccctcagcagcgtggtgaccgtgccctccagcagcttgggcacccagacctacatctgcaacgtgaatcacaagcccagcaacaccaaggtggacaagaaagttgagcccaaatcttgtgacaaaactcacacatgcccaccgtgcccagcacctgaactcctggggggaccgtcagtcttcctcttccccccaaaacccaaggacaccctcatgatctcccggacccctgaggtcacatgcgtggtggtggacgtgagccacgaagaccctgaggtcaagttcaactggtacgtggacggcgtggaggtgcataatgccaagacaaagccgcgggaggagcagtacaacagcacgtaccgtgtggtcagcgtcctcaccgtcctgcaccaggactggctgaatggcaaggagtacaagtgcaaggtctccaacaaagccctcccagcccccatcgagaaaaccatctccaaagccaaagggcagccccgagaaccacaggtgtacaccctgcccccatcccgggaggagatgaccaagaaccaggtcagcctgacctgcctggtcaaaggcttctatcccagcgacatcgccgtggagtgggagagcaatgggcagccggagaacaactacaagaccacgcctcccgtgctggactccgacggctccttcttcctctatagcaagctcaccgtggacaagagcaggtggcagcaggggaacgtcttctcatgctccgtgatgcatgaggctctgcacaaccactacacgcagaagagcctctccctgtctccgggtaaatga

SEQ ID NO: 664 - protein, 451 aa, artificial
  22G10 HC
EVQLLESGGGLVQPGGSLRLSCAASGFTFSSYAMNWVRQAPGKGLEWVSTISGGGANTYYADSVKGRFTISSDNSKSTLYLQMNSLRAADTAVYHCAKGGMGGYYYGMDVWGQGTTVTVSSASTKGPSVFPLAPSSKSTSGGTAALGCLVKDYFPEPVTVSWNSGALTSGVHTFPAVLQSSGLYSLSSVVTVPSSSLGTQTYICNVNHKPSNTKVDKKVEPKSCDKTHTCPPCPAPELLGGPSVFLFPPKPKDTLMISRTPEVTCVVVDVSHEDPEVKFNWYVDGVEVHNAKTKPREEQYNSTYRVVSVLTVLHQDWLNGKEYKCKVSNKALPAPIEKTISKAKGQPREPQVYTLPPSREEMTKNQVSLTCLVKGFYPSDIAVEWESNGQPENNYKTTPPVLDSDGSFFLYSKLTVDKSRWQQGNVFSCSVMHEALHNHYTQKSLSLSPGK

SEQ ID NO: 665 - DNA, 1368 bp, artificial
  23A10 HC
caggtgcagctggtggagtctgggggaggcgtggtccagcctgggaggtccctgagactctcctgtgcagcgtctggattcaccttcagtcgctatggcatacactgggtccgccaggctccaggcaaggggctggagtgggtggcagttatatggtatgatggaagtaataaatactatgcagactccgtgaagggccgattcaccatctccagagacaattccaagaacacgctgtatctgctaatgaacagcctgagagccgaggactcggctgtgtattactgtgcgagaagggccggtatacctggaactacgggctactactatggtatggacgtctggggccaagggaccacggtcaccgtctcctcagcttccaccaagggcccatccgtcttccccctggcgccctcctccaagagcacctctgggggcacagcggccctgggctgcctggtcaaggactacttccccgaaccggtgacggtgtcgtggaactcaggggccctgaccagcggcgtgcacaccttcccggctgtcctacagtcctcaggactctactccctcagcagcgtggtgaccgtgccctccagcagcttgggcacccagacctacatctgcaacgtgaatcacaagcccagcaacaccaaggtggacaagaaagttgagcccaaatcttgtgacaaaactcacacatgcccaccgtgcccagcacctgaactcctggggggaccgtcagtcttcctcttccccccaaaacccaaggacaccctcatgatctcccggacccctgaggtcacatgcgtggtggtggacgtgagccacgaagaccctgaggtcaagttcaactggtacgtggacggcgtggaggtgcataatgccaagacaaagccgcgggaggagcagtacaacagcacgtaccgtgtggtcagcgtcctcaccgtcctgcaccaggactggctgaatggcaaggagtacaagtgcaaggtctccaacaaagccctcccagcccccatcgagaaaaccatctccaaagccaaagggcagccccgagaaccacaggtgtacaccctgcccccatcccgggaggagatgaccaagaaccaggtcagcctgacctgcctggtcaaaggcttctatcccagcgacatcgccgtggagtgggagagcaatgggcagccggagaacaactacaagaccacgcctcccgtgctggactccgacggctccttcttcctctatagcaagctcaccgtggacaagagcaggtggcagcaggggaacgtcttctcatgctccgtgatgcatgaggctctgcacaaccactacacgcagaagagcctctccctgtctccgggtaaatga

SEQ ID NO: 666 - protein, 455 aa, artificial
  23A10 HC
QVQLVESGGGVVQPGRSLRLSCAASGFTFSRYGIHWVRQAPGKGLEWVAVIWYDGSNKYYADSVKGRFTISRDNSKNTLYLLMNSLRAEDSAVYYCARRAGIPGTTGYYYGMDVWGQGTTVTVSSASTKGPSVFPLAPSSKSTSGGTAALGCLVKDYFPEPVTVSWNSGALTSGVHTFPAVLQSSGLYSLSSVVTVPSSSLGTQTYICNVNHKPSNTKVDKKVEPKSCDKTHTCPPCPAPELLGGPSVFLFPPKPKDTLMISRTPEVTCVVVDVSHEDPEVKFNWYVDGVEVHNAKTKPREEQYNSTYRVVSVLTVLHQDWLNGKEYKCKVSNKALPAPIEKTISKAKGQPREPQVYTLPPSREEMTKNQVSLTCLVKGFYPSDIAVEWESNGQPENNYKTTPPVLDSDGSFFLYSKLTVDKSRWQQGNVFSCSVMHEALHNHYTQKSLSLSPGK

SEQ ID NO: 667 - DNA, 1353 bp, artificial
  25F8 HC
caggtgcagctggtgcagtctggggctgaggtgaagaagcctggggcctcagtgaaggtttcctgcaaggcatctggatacaccttcaccagctactatattcactgggtgcgccaggcccctggacaaggacttgagtggatgggaataatcaaccccagtggtggtagcacaaggtacgcacagaagttccagggcagagtcaccatgaccagggacacgtccacgagcacagtcttcatggagctgagcagcctgagatctgaggacacggccgtgtattactgtgcgcgagggggaatacagctatggttacattttgactactggggccagggaaccctggtcaccgtctcctcagcttccaccaagggcccatccgtcttccccctggcgccctcctccaagagcacctctgggggcacagcggccctgggctgcctggtcaaggactacttccccgaaccggtgacggtgtcgtggaactcaggggccctgaccagcggcgtgcacaccttcccggctgtcctacagtcctcaggactctactccctcagcagcgtggtgaccgtgccctccagcagcttgggcacccagacctacatctgcaacgtgaatcacaagcccagcaacaccaaggtggacaagaaagttgagcccaaatcttgtgacaaaactcacacatgcccaccgtgcccagcacctgaactcctggggggaccgtcagtcttcctcttccccccaaaacccaaggacaccctcatgatctcccggacccctgaggtcacatgcgtggtggtggacgtgagccacgaagaccctgaggtcaagttcaactggtacgtggacggcgtggaggtgcataatgccaagacaaagccgcgggaggagcagtacaacagcacgtaccgtgtggtcagcgtcctcaccgtcctgcaccaggactggctgaatggcaaggagtacaagtgcaaggtctccaacaaagccctcccagcccccatcgagaaaaccatctccaaagccaaagggcagccccgagaaccacaggtgtacaccctgcccccatcccgggaggagatgaccaagaaccaggtcagcctgacctgcctggtcaaaggcttctatcccagcgacatcgccgtggagtgggagagcaatgggcagccggagaacaactacaagaccacgcctcccgtgctggactccgacggctccttcttcctctatagcaagctcaccgtggacaagagcaggtggcagcaggggaacgtcttctcatgctccgtgatgcatgaggctctgcacaaccactacacgcagaagagcctctccctgtctccgggtaaatga

SEQ ID NO: 668 - protein, 450 aa, artificial
  25F8 HC
QVQLVQSGAEVKKPGASVKVSCKASGYTFTSYYIHWVRQAPGQGLEWMGIINPSGGSTRYAQKFQGRVTMTRDTSTSTVFMELSSLRSEDTAVYYCARGGIQLWLHFDYWGQGTLVTVSSASTKGPSVFPLAPSSKSTSGGTAALGCLVKDYFPEPVTVSWNSGALTSGVHTFPAVLQSSGLYSLSSVVTVPSSSLGTQTYICNVNHKPSNTKVDKKVEPKSCDKTHTCPPCPAPELLGGPSVFLFPPKPKDTLMISRTPEVTCVVVDVSHEDPEVKFNWYVDGVEVHNAKTKPREEQYNSTYRVVSVLTVLHQDWLNGKEYKCKVSNKALPAPIEKTISKAKGQPREPQVYTLPPSREEMTKNQVSLTCLVKGFYPSDIAVEWESNGQPENNYKTTPPVLDSDGSFFLYSKLTVDKSRWQQGNVFSCSVMHEALHNHYTQKSLSLSPGK

SEQ ID NO: 669 - DNA, 1353 bp, artificial
  25G10 HC
caggtgcagctgcaggagtcgggcccaggactggtgaagccttcggagaccctgtccctcacctgcactgtctctggtggctccatcagtggttactactggagctggatccggcagcccccagggaagggactggagtggattgggtatatctattacattgggagcaccaactacaacccctccctcaagagtcgagtcaccatgtcagtagacacgtccaagaaccagttctccctgaagctgagctctgtgaccgctgcggacacggccgtgtattactgtgcgagagatgggagcagtggctggtaccggtggttcgacccctggggccagggaaccctggtcaccgtctcctcagcttccaccaagggcccatccgtcttccccctggcgccctcctccaagagcacctctgggggcacagcggccctgggctgcctggtcaaggactacttccccgaaccggtgacggtgtcgtggaactcaggggccctgaccagcggcgtgcacaccttcccggctgtcctacagtcctcaggactctactccctcagcagcgtggtgaccgtgccctccagcagcttgggcacccagacctacatctgcaacgtgaatcacaagcccagcaacaccaaggtggacaagaaagttgagcccaaatcttgtgacaaaactcacacatgcccaccgtgcccagcacctgaactcctggggggaccgtcagtcttcctcttccccccaaaacccaaggacaccctcatgatctcccggacccctgaggtcacatgcgtggtggtggacgtgagccacgaagaccctgaggtcaagttcaactggtacgtggacggcgtggaggtgcataatgccaagacaaagccgcgggaggagcagtacaacagcacgtaccgtgtggtcagcgtcctcaccgtcctgcaccaggactggctgaatggcaaggagtacaagtgcaaggtctccaacaaagccctcccagcccccatcgagaaaaccatctccaaagccaaagggcagccccgagaaccacaggtgtacaccctgcccccatcccgggaggagatgaccaagaaccaggtcagcctgacctgcctggtcaaaggcttctatcccagcgacatcgccgtggagtgggagagcaatgggcagccggagaacaactacaagaccacgcctcccgtgctggactccgacggctccttcttcctctatagcaagctcaccgtggacaagagcaggtggcagcaggggaacgtcttctcatgctccgtgatgcatgaggctctgcacaaccactacacgcagaagagcctctccctgtctccgggtaaatga

SEQ ID NO: 670 - protein, 449 aa, artificial
  25G10 HC
QVQLQESGPGLVKPSETLSLTCTVSGGSISGYYWSWIRQPPGKGLEWIGYIYYIGSTNYNPSLKSRVTMSVDTSKNQFSLKLSSVTAADTAVYYCARDGSSGWYRWFDPWGQGTLVTVSSASTKGPSVFPLAPSSKSTSGGTAALGCLVKDYFPEPVTVSWNSGALTSGVHTFPAVLQSSGLYSLSSVVTVPSSSLGTQTYICNVNHKPSNTKVDKKVEPKSCDKTHTCPPCPAPELLGGPSVFLFPPKPKDTLMISRTPEVTCVVVDVSHEDPEVKFNWYVDGVEVHNAKTKPREEQYNSTYRVVSVLTVLHQDWLNGKEYKCKVSNKALPAPIEKTISKAKGQPREPQVYTLPPSREEMTKNQVSLTCLVKGFYPSDIAVEWESNGQPENNYKTTPPVLDSDGSFFLYSKLTVDKSRWQQGNVFSCSVMHEALHNHYTQKSLSLSPG

SEQ ID NO: 671 - DNA, 1353 bp, artificial
  26D1 HC
caggtgcagttggtgcagtctggggctgaggtgaagaagcctggggcctcagtgaaggtttcctgtaaggcatctagatacaccttcaccagctactatatgtcctgggtgcgacaggcccctggacaagggcttgagtggatgggaataatccaccctagtggtggtgacacaacctacgcacagaagttccagggcagagtcaccatgaccggggacacgtccacgagcacagtctacatggagctgagcagcctgagatctgaggacacggccgtgtattactgtgcgagaggggggataaaactatggttacattttgactattggggccagggaaccctggtcaccgtctcctcagcttccaccaagggcccatccgtcttccccctggcgccctcctccaagagcacctctgggggcacagcggccctgggctgcctggtcaaggactacttccccgaaccggtgacggtgtcgtggaactcaggggccctgaccagcggcgtgcacaccttcccggctgtcctacagtcctcaggactctactccctcagcagcgtggtgaccgtgccctccagcagcttgggcacccagacctacatctgcaacgtgaatcacaagcccagcaacaccaaggtggacaagaaagttgagcccaaatcttgtgacaaaactcacacatgcccaccgtgcccagcacctgaactcctggggggaccgtcagtcttcctcttccccccaaaacccaaggacaccctcatgatctcccggacccctgaggtcacatgcgtggtggtggacgtgagccacgaagaccctgaggtcaagttcaactggtacgtggacggcgtggaggtgcataatgccaagacaaagccgcgggaggagcagtacaacagcacgtaccgtgtggtcagcgtcctcaccgtcctgcaccaggactggctgaatggcaaggagtacaagtgcaaggtctccaacaaagccctcccagcccccatcgagaaaaccatctccaaagccaaagggcagccccgagaaccacaggtgtacaccctgcccccatcccgggaggagatgaccaagaaccaggtcagcctgacctgcctggtcaaaggcttctatcccagcgacatcgccgtggagtgggagagcaatgggcagccggagaacaactacaagaccacgcctcccgtgctggactccgacggctccttcttcctctatagcaagctcaccgtggacaagagcaggtggcagcaggggaacgtcttctcatgctccgtgatgcatgaggctctgcacaaccactacacgcagaagagcctctccctgtctccgggtaaatga

SEQ ID NO: 672 - protein, 450 aa, artificial
  26D1 HC
QVQLVQSGAEVKKPGASVKVSCKASRYTFTSYYMSWVRQAPGQGLEWMGIIHPSGGDTTYAQKFQGRVTMTGDTSTSTVYMELSSLRSEDTAVYYCARGGIKLWLHFDYWGQGTLVTVSSASTKGPSVFPLAPSSKSTSGGTAALGCLVKDYFPEPVTVSWNSGALTSGVHTFPAVLQSSGLYSLSSVVTVPSSSLGTQTYICNVNHKPSNTKVDKKVEPKSCDKTHTCPPCPAPELLGGPSVFLFPPKPKDTLMISRTPEVTCVVVDVSHEDPEVKFNWYVDGVEVHNAKTKPREEQYNSTYRVVSVLTVLHQDWLNGKEYKCKVSNKALPAPIEKTISKAKGQPREPQVYTLPPSREEMTKNQVSLTCLVKGFYPSDIAVEWESNGQPENNYKTTPPVLDSDGSFFLYSKLTVDKSRWQQGNVFSCSVMHEALHNHYTQKSLSLSPGK

SEQ ID NO: 673 - DNA, 1353 bp, artificial
  26F12 HC
caggtgcagttggtgcagtctggggctgaggtgaagaagcctggggcctcagtgaaggtttcctgcaaggcatctagatacaccttcaccaactactatatgtcctgggtgcgacaggcccctggacaagggcttgagtggatgggaataatcaaccctagtggtggtgactcaacctacgcacagaagttccagggcagactcaccatgaccggggacacgtccacgagcacagtctacatggagctgagcagcctgagatctgaggacacggccgtgtattactgtgcgagaggggggatacaactatggttacattttgactactggggccagggaaccctggtcaccgtctcctcagcttccaccaagggcccatccgtcttccccctggcgccctcctccaagagcacctctgggggcacagcggccctgggctgcctggtcaaggactacttccccgaaccggtgacggtgtcgtggaactcaggggccctgaccagcggcgtgcacaccttcccggctgtcctacagtcctcaggactctactccctcagcagcgtggtgaccgtgccctccagcagcttgggcacccagacctacatctgcaacgtgaatcacaagcccagcaacaccaaggtggacaagaaagttgagcccaaatcttgtgacaaaactcacacatgcccaccgtgcccagcacctgaactcctggggggaccgtcagtcttcctcttccccccaaaacccaaggacaccctcatgatctcccggacccctgaggtcacatgcgtggtggtggacgtgagccacgaagaccctgaggtcaagttcaactggtacgtggacggcgtggaggtgcataatgccaagacaaagccgcgggaggagcagtacaacagcacgtaccgtgtggtcagcgtcctcaccgtcctgcaccaggactggctgaatggcaaggagtacaagtgcaaggtctccaacaaagccctcccagcccccatcgagaaaaccatctccaaagccaaagggcagccccgagaaccacaggtgtacaccctgcccccatcccgggaggagatgaccaagaaccaggtcagcctgacctgcctggtcaaaggcttctatcccagcgacatcgccgtggagtgggagagcaatgggcagccggagaacaactacaagaccacgcctcccgtgctggactccgacggctccttcttcctctatagcaagctcaccgtggacaagagcaggtggcagcaggggaacgtcttctcatgctccgtgatgcatgaggctctgcacaaccactacacgcagaagagcctctccctgtctccgggtaaatga

SEQ ID NO: 674 - protein, 450 aa, artificial
  26F12 HC
QVQLVQSGAEVKKPGASVKVSCKASRYTFTNYYMSWVRQAPGQGLEWMGIINPSGGDSTYAQKFQGRLTMTGDTSTSTVYMELSSLRSEDTAVYYCARGGIQLWLHFDYWGQGTLVTVSSASTKGPSVFPLAPSSKSTSGGTAALGCLVKDYFPEPVTVSWNSGALTSGVHTFPAVLQSSGLYSLSSVVTVPSSSLGTQTYICNVNHKPSNTKVDKKVEPKSCDKTHTCPPCPAPELLGGPSVFLFPPKPKDTLMISRTPEVTCVVVDVSHEDPEVKFNWYVDGVEVHNAKTKPREEQYNSTYRVVSVLTVLHQDWLNGKEYKCKVSNKALPAPIEKTISKAKGQPREPQVYTLPPSREEMTKNQVSLTCLVKGFYPSDIAVEWESNGQPENNYKTTPPVLDSDGSFFLYSKLTVDKSRWQQGNVFSCSVMHEALHNHYTQKSLSLSPGK

SEQ ID NO: 675 - DNA, 639 bp, artificial
  2G6 LC
tcctatgaactgactcagccaccctcagtgtccgtgtccccaggacagacagccagcatcacctgctctggagataggttgggggaaaaatatacttgctggtatcagcagaggccaggccagtcccctttgctggtcatctatcaagataccaagcggccctcagggatccctgagcgattctctggctccaactctggtaacacagccactctgaccatcagcgggacccaggctatggatgaggctgactattactgtcaggcgtgggacagcagcactgtggtattcggcggagggaccaagctgaccgtcctaggtcagcccaaggccaaccccactgtcactctgttcccgccctcctctgaggagctccaagccaacaaggccacactagtgtgtctgatcagtgacttctacccgggagctgtgacagtggcctggaaggcagatggcagccccgtcaaggcgggagtggagaccaccaaaccctccaaacagagcaacaacaagtacgcggccagcagctacctgagcctgacgcccgagcagtggaagtcccacagaagctacagctgccaggtcacgcatgaagggagcaccgtggagaagacagtggcccctacagaatgttcatga

SEQ ID NO: 676 - protein, 212 aa, artificial
  2G6 LC
SYELTQPPSVSVSPGQTASITCSGDRLGEKYTCWYQQRPGQSPLLVIYQDTKRPSGIPERFSGSNSGNTATLTISGTQAMDEADYYCQAWDSSTVVFGGGTKLTVLGQPKANPTVTLFPPSSEELQANKATLVCLISDFYPGAVTVAWKADGSPVKAGVETTKPSKQSNNKYAASSYLSLTPEQWKSHRSYSCQVTHEGSTVEKTVAPTECS

SEQ ID NO: 677 - DNA, 645 bp, artificial
  4A2 LC
gaaattgtgttgacgcagtctccaggcaccctgtctttgtctccaggggaaagagccaccctctcctgcagggccagtcggaatattagcagcagctacttagcctggtaccagcagaaacctggccaggctcccaggctcctcatctatggtccatccagcagggccactggcatcccagacaggttcagtggcagtgggtctgggacagacttcactctcaccatcagcagactggagcctgaagattttacagtgtattactgtcagcagtatggtagctcattcactttcggccctgggaccaaagtggatatcaaacgtacggtggctgcaccatctgtcttcatcttcccgccatctgatgagcagttgaaatctggaactgcctctgttgtgtgcctgctgaataacttctatcccagagaggccaaagtacagtggaaggtggataacgccctccaatcgggtaactcccaggagagtgtcacagagcaggacagcaaggacagcacctacagcctcagcagcaccctgacgctgagcaaagcagactacgagaaacacaaagtctacgcctgcgaagtcacccatcagggcctgagctcgcccgtcacaaagagcttcaacaggggagagtgttga

SEQ ID NO: 678 - protein, 214 aa, artificial
  4A2 LC
EIVLTQSPGTLSLSPGERATLSCRASRNISSSYLAWYQQKPGQAPRLLIYGPSSRATGIPDRFSGSGSGTDFTLTISRLEPEDFTVYYCQQYGSSFTFGPGTKVDIKRTVAAPSVFIFPPSDEQLKSGTASVVCLLNNFYPREAKVQWKVDNALQSGNSQESVTEQDSKDSTYSLSSTLTLSKADYEKHKVYACEVTHQGLSSPVTKSFNRGEC

SEQ ID NO: 679 - DNA, 654 bp, artificial
  4A9 LC
cagtctgtgctgacgcagccgccctcagtgtctggggccccaggacagagggtcaccatctcctgcactgggagcagctccaacatcgggacaggttatgctgtacactggtaccagcagtttccaggaacagcccccaaactcctcatctatggtaacaacaatcggccctcaggggttcctgaccgattctctggctccaagtctggcacctcagcctccctggccatcactgggctccaggctgaggatgaggctgattattactgccagtcctatgacagcagactgagtggttgggtgttcggcggagggaccaagctgaccgtcctaggtcagcccaaggccaaccccactgtcactctgttcccgccctcctctgaggagctccaagccaacaaggccacactagtgtgtctgatcagtgacttctacccgggagctgtgacagtggcctggaaggcagatggcagccccgtcaaggcgggagtggagaccaccaaaccctccaaacagagcaacaacaagtacgcggccagcagctacctgagcctgacgcccgagcagtggaagtcccacagaagctacagctgccaggtcacgcatgaagggagcaccgtggagaagacagtggcccctacagaatgttcatga

SEQ ID NO: 680 - protein, 217 aa, artificial
  4A9 LC
QSVLTQPPSVSGAPGQRVTISCTGSSSNIGTGYAVHWYQQFPGTAPKLLIYGNNNRPSGVPDRFSGSKSGTSASLAITGLQAEDEADYYCQSYDSRLSGWVFGGGTKLTVLGQPKANPTVTLFPPSSEELQANKATLVCLISDFYPGAVTVAWKADGSPVKAGVETTKPSKQSNNKYAASSYLSLTPEQWKSHRSYSCQVTHEGSTVEKTVAPTECS

SEQ ID NO: 681 - DNA, 645 bp, artificial
  4B10 LC
gaaattgtattgacgcagtctccaggcaccctgtctttgtctccaggggaaagagccaccctctcctgcagggccagtcagagtgttagcaacacctacttagcctggtaccatcagagacctggccaggctcccaggctcctcatctatggtgcatccagcagggccactggcatcccagacagattcagtggcagtgggtctgggacagacttcgctctcaccatcagcagtctggagcctgaagattttgcagtgtattactgtcagcagtacagtaactcgtggacgttcggccaagggaccaaggtggaaatcaaacgaactgtggctgcaccatctgtcttcatcttcccgccatctgatgagcagttgaaatctggaactgcctctgttgtgtgcctgctgaataacttctatcccagagaggccaaagtacagtggaaggtggataacgccctccaatcgggtaactcccaggagagtgtcacagagcaggacagcaaggacagcacctacagcctcagcagcaccctgacgctgagcaaagcagactacgagaaacacaaagtctacgcctgcgaagtcacccatcagggcctgagctcgcccgtcacaaagagcttcaacaggggagagtgttga

SEQ ID NO: 682 - protein, 214 aa, artificial
  4B10 LC
EIVLTQSPGTLSLSPGERATLSCRASQSVSNTYLAWYHQRPGQAPRLLIYGASSRATGIPDRFSGSGSGTDFALTISSLEPEDFAVYYCQQYSNSWTFGQGTKVEIKRTVAAPSVFIFPPSDEQLKSGTASVVCLLNNFYPREAKVQWKVDNALQSGNSQESVTEQDSKDSTYSLSSTLTLSKADYEKHKVYACEVTHQGLSSPVTKSFNRGEC

SEQ ID NO: 683 - DNA, 645 bp, artificial
  4F3 LC
gaaattgtgttgacgcagtctccaggcaccctgtctttgtctccaggggaaagagccaccctctcctgcagggccagtcagagtgttagcagcagctacttagcctggtaccagcagaaacctggccaggctcccaggctcctcatctatggtgcatccagcagggccactggcatcccagacaggttcagtggcagtgggtctgggacagacttcactctcaccatcagcagactggaacctgaggattttgcagtgtattactgtcagcagtatggtagctcgtggacgttcggccaagggaccaaggtggaaatcaaacgtacggtggctgcaccatctgtcttcatcttcccgccatctgatgagcagttgaaatctggaactgcctctgttgtgtgcctgctgaataacttctatcccagagaggccaaagtacagtggaaggtggataacgccctccaatcgggtaactcccaggagagtgtcacagagcaggacagcaaggacagcacctacagcctcagcagcaccctgacgctgagcaaagcagactacgagaaacacaaagtctacgcctgcgaagtcacccatcagggcctgagctcgcccgtcacaaagagcttcaacaggggagagtgttga

SEQ ID NO: 684 - protein, 214 aa, artificial
  4F3 LC
EIVLTQSPGTLSLSPGERATLSCRASQSVSSSYLAWYQQKPGQAPRLLIYGASSRATGIPDRFSGSGSGTDFTLTISRLEPEDFAVYYCQQYGSSWTFGQGTKVEIKRTVAAPSVFIFPPSDEQLKSGTASVVCLLNNFYPREAKVQWKVDNALQSGNSQESVTEQDSKDSTYSLSSTLTLSKADYEKHKVYACEVTHQGLSSPVTKSFNRGEC

SEQ ID NO: 685 - DNA, 654 bp, artificial
  4F7 LC
cagtctgtgctgacgcagccgccctcagtgtctggggccccagggcagagggtcaccatctcctgcactgggagcagctccaatatcgggacaggttatgatgtacactggtatcagcagcttccaggaacagcccccaaactcctcatccatggtaacagcaatcggccctcaggggtccctgaccgattctctggctccaagtctggcacctcagcctccctggccatcactgggctccaggctgaggatgaggctgattattactgccagtcctatgacagcagtctgagtggttgggtgttcggcggagggaccaggttgaccgtcctaggtcagcccaaggccaaccccactgtcactctgttcccgccctcctctgaggagctccaagccaacaaggccacactagtgtgtctgatcagtgacttctacccgggagctgtgacagtggcctggaaggcagatggcagccccgtcaaggcgggagtggagaccaccaaaccctccaaacagagcaacaacaagtacgcggccagcagctacctgagcctgacgcccgagcagtggaagtcccacagaagctacagctgccaggtcacgcatgaagggagcaccgtggagaagacagtggcccctacagaatgttcatga

SEQ ID NO: 686 - protein, 217 aa, artificial
  4F7 LC
QSVLTQPPSVSGAPGQRVTISCTGSSSNIGTGYDVHWYQQLPGTAPKLLIHGNSNRPSGVPDRFSGSKSGTSASLAITGLQAEDEADYYCQSYDSSLSGWVFGGGTRLTVLGQPKANPTVTLFPPSSEELQANKATLVCLISDFYPGAVTVAWKADGSPVKAGVETTKPSKQSNNKYAASSYLSLTPEQWKSHRSYSCQVTHEGSTVEKTVAPTECS

SEQ ID NO: 687 - DNA, 648 bp, artificial
  16A4 LC
gaaattgtgttgacgcagtctccaggcaccctgtctttgtctccaggggaaagagccaccctctcctgcagggccagtcagagtgttagcagcagttatttagcctggtaccagcagaaacctggccaggctcccaggctcctcatctatggtacatccagcagggccactggcatcccagacaggttcagtggcagtgggtctgggacagacttcactctcaccatcagcagactggagcctgaagattttgcagtgtattattgtcagcagtacggtagctcacctttcactttcggcggagggaccaaggtggagatcaaacgaactgtggctgcaccatctgtcttcatcttcccgccatctgatgagcagttgaaatctggtaccgcctctgttgtgtgcctgctgaataacttctatcccagagaggccaaagtacagtggaaggtggataacgccctccaatcgggtaactcccaggagagtgtcacagagcaggacagcaaggacagcacctacagcctcagcagcaccctgacgctgagcaaagcagactacgagaaacacaaagtctacgcctgcgaagtcacccatcagggcctgagctcgcccgtcacaaagagcttcaacaggggagagtgttga

SEQ ID NO: 688 - protein, 215 aa, artificial
  16A4 LC
EIVLTQSPGTLSLSPGERATLSCRASQSVSSSYLAWYQQKPGQAPRLLIYGTSSRATGIPDRFSGSGSGTDFTLTISRLEPEDFAVYYCQQYGSSPFTFGGGTKVEIKRTVAAPSVFIFPPSDEQLKSGTASVVCLLNNFYPREAKVQWKVDNALQSGNSQESVTEQDSKDSTYSLSSTLTLSKADYEKHKVYACEVTHQGLSSPVTKSFNRGEC

SEQ ID NO: 689 - DNA, 648 bp, artificial
  16C1 LC
gaaattgtgttgacgcagtctccaggcaccctgtctttgtctccaggggaaagagccaccctctcctgcagggccagccagagtgttagcagcagctacttagcctggtaccagcagaaacctggccaggctcccaggctcctcatctttggtgcatccagcagggccactggcatcccagacaggttcagtggcagtgggtctgggacagacttcactctcaccatcagcggactggagcctgaagattttgcagtgtatcactgtcagcagtatggtaactcaccgctcactttcggcggagggaccaaggtggagatcaaacgaactgtggctgcaccatctgtcttcatcttcccgccatctgatgagcagttgaaatctggtaccgcctctgttgtgtgcctgctgaataacttctatcccagagaggccaaagtacagtggaaggtggataacgccctccaatcgggtaactcccaggagagtgtcacagagcaggacagcaaggacagcacctacagcctcagcagcaccctgacgctgagcaaagcagactacgagaaacacaaagtctacgcctgcgaagtcacccatcagggcctgagctcgcccgtcacaaagagcttcaacaggggagagtgttga

SEQ ID NO: 690 - protein, 215 aa, artificial
  16C1 LC
EIVLTQSPGTLSLSPGERATLSCRASQSVSSSYLAWYQQKPGQAPRLLIFGASSRATGIPDRFSGSGSGTDFTLTISGLEPEDFAVYHCQQYGNSPLTFGGGTKVEIKRTVAAPSVFIFPPSDEQLKSGTASVVCLLNNFYPREAKVQWKVDNALQSGNSQESVTEQDSKDSTYSLSSTLTLSKADYEKHKVYACEVTHQGLSSPVTKSFNRGEC

SEQ ID NO: 691 - DNA, 648 bp, artificial
  17H8 LC
gacattgtattgacgcagtctccaggcaccctgtctttgtctccaggggaaagagccaccctctcctgcagggccagtcagagtgttgccggcagctacctagcctggtaccagcagaaacctggccaggctcccaggctcctcatctctggtgcatccagcagggccactggcatcccagacaggttcagtggcagtgggtctgggacagacttcactctcaccatcagcagactggagcctgaagattttgcagtgtattactgtcagcagtatggtaaatcaccgatcaccttcggccaagggacacgactggagatgaaaggaactgtggctgcaccatctgtcttcatcttcccgccatctgatgagcagttgaaatctggtaccgcctctgttgtgtgcctgctgaataacttctatcccagagaggccaaagtacagtggaaggtggataacgccctccaatcgggtaactcccaggagagtgtcacagagcaggacagcaaggacagcacctacagcctcagcagcaccctgacgctgagcaaagcagactacgagaaacacaaagtctacgcctgcgaagtcacccatcagggcctgagctcgcccgtcacaaagagcttcaacaggggagagtgttga

SEQ ID NO: 692 - protein, 215 aa, artificial
  17H8 LC
DIVLTQSPGTLSLSPGERATLSCRASQSVAGSYLAWYQQKPGQAPRLLISGASSRATGIPDRFSGSGSGTDFTLTISRLEPEDFAVYYCQQYGKSPITFGQGTRLEMKGTVAAPSVFIFPPSDEQLKSGTASVVCLLNNFYPREAKVQWKVDNALQSGNSQESVTEQDSKDSTYSLSSTLTLSKADYEKHKVYACEVTHQGLSSPVTKSFNRGEC

SEQ ID NO: 693 - DNA, 651 bp, artificial
  19B5 LC
cagtctgcgctgactcagccaccctcaacgactgggacccccgggcagagggtcaccatctcttgttctggaagcaggtccaacatcggaagcaattttgtaaactggtacaagcagctcccaggaacggcccccaaagtcctcatctatactaataatcagcggccctcaggggtccctgaccgattctctggctccaagtctggcacctcagcctccctggccatcagtgggctccagtctgaggatgagtctgattattactgcgcaacatgggatgacagtatgaatggttgggtgttcggcggagggaccaaactgaccgtcctaggtcagcccaaggctgccccctcggtcactctgttcccaccctcctctgaggagcttcaagccaacaaggccacactggtgtgtctcataagtgacttctacccgggagccgtgacagtggcctggaaggcagatagcagccccgtcaaggcgggagtggagaccaccacaccctccaaacaaagcaacaacaagtacgcggccagcagctatctgagcctgacgcctgagcagtggaagtcccacagaagctacagctgccaggtcacgcatgaagggagcaccgtggagaagacagtggcccctacagaatgttcatga

SEQ ID NO: 694 - protein, 216 aa, artificial
  19B5 LC
QSALTQPPSTTGTPGQRVTISCSGSRSNIGSNFVNWYKQLPGTAPKVLIYTNNQRPSGVPDRFSGSKSGTSASLAISGLQSEDESDYYCATWDDSMNGWVFGGGTKLTVLGQPKAAPSVTLFPPSSEELQANKATLVCLISDFYPGAVTVAWKADSSPVKAGVETTTPSKQSNNKYAASSYLSLTPEQWKSHRSYSCQVTHEGSTVEKTVAPTECS

SEQ ID NO: 695 - DNA, 651 bp, artificial
  20D3 LC
cagtctgcgctgactcagccaccctcagcgactgggacccccgggcagagggtcaccatctcttgttctggaagcagctccaacatcggaagcaattttgtaaactggtacaagcagctcccaggaacggcccccaaagtcctcatctatactaataatcagcggccctcaggggtccctgaccgattctctggctccaagtctggcacctcagcctccctggccatcagtgggctccagtctgaggatgagtctgattattactgtgcaacatgggatgacagcctgaatggttgggtgttcggcggagggaccaagctgaccgtcctaggtcagcccaaggctgccccctcggtcactctgttcccaccctcctctgaggagcttcaagccaacaaggccacactggtgtgtctcataagtgacttctacccgggagccgtgacagtggcctggaaggcagatagcagccccgtcaaggcgggagtggagaccaccacaccctccaaacaaagcaacaacaagtacgcggccagcagctatctgagcctgacgcctgagcagtggaagtcccacagaagctacagctgccaggtcacgcatgaagggagcaccgtggagaagacagtggcccctacagaatgttcatga

SEQ ID NO: 696 - protein, 216 aa, artificial
  20D3 LC
QSALTQPPSATGTPGQRVTISCSGSSSNIGSNFVNWYKQLPGTAPKVLIYTNNQRPSGVPDRFSGSKSGTSASLAISGLQSEDESDYYCATWDDSLNGWVFGGGTKLTVLGQPKAAPSVTLFPPSSEELQANKATLVCLISDFYPGAVTVAWKADSSPVKAGVETTTPSKQSNNKYAASSYLSLTPEQWKSHRSYSCQVTHEGSTVEKTVAPTECS

SEQ ID NO: 697 - DNA, 651 bp, artificial
  22D1 LC
cagtctgcgctgactcagccaccctcagcgactgggacccccgggcagagggtcaccatctcttgttctggaagcagctccaacatcggaagcaattttgtaaactggtacaagcagctcccaggaacggcccccaaagtcctcatctatactaataatcagcggccctcaggggtccctgaccgattctctggctccaagtctggcacctcagcctccctggccatcagtgggctccagtctgaggatgagtctgattattactgtgcaacatgggatgacagtatgaatggttgggtgttcggcggagggaccaagctgaccgtcctaggtcagcccaaggctgccccctcggtcactctgttcccaccctcctctgaggagcttcaagccaacaaggccacactggtgtgtctcataagtgacttctacccgggagccgtgacagtggcctggaaggcagatagcagccccgtcaaggcgggagtggagaccaccacaccctccaaacaaagcaacaacaagtacgcggccagcagctatctgagcctgacgcctgagcagtggaagtcccacagaagctacagctgccaggtcacgcatgaagggagcaccgtggagaagacagtggcccctacagaatgttcatga

SEQ ID NO: 698 - protein, 216 aa, artificial
  22D1 LC
QSALTQPPSATGTPGQRVTISCSGSSSNIGSNFVNWYKQLPGTAPKVLIYTNNQRPSGVPDRFSGSKSGTSASLAISGLQSEDESDYYCATWDDSMNGWVFGGGTKLTVLGQPKAAPSVTLFPPSSEELQANKATLVCLISDFYPGAVTVAWKADSSPVKAGVETTTPSKQSNNKYAASSYLSLTPEQWKSHRSYSCQVTHEGSTVEKTVAPTECS

SEQ ID NO: 699 - DNA, 645 bp, artificial
  22G10 LC
gaaatagtgatgacgcagtctccagtcaccctgtctctgtctctaggggaaagagccaccctctcctgcagggccagtcagagtattagcagcaacttagcctggttccagcagaaacctggccaggctcccagactcctcatctatggtgcatttaccagggccactggtatcccagccagggtcagtggcagtgggtctgggacagagttcactctcaccatcagcagcctgcagtctgaagattttgcagtttattactgtcagcagtataattactggccgctcactttcggcggagggaccaaggtggagatcaagcgaactgtggctgcaccatctgtcttcatcttcccgccatctgatgagcagttgaaatctggtaccgcctctgttgtgtgcctgctgaataacttctatcccagagaggccaaagtacagtggaaggtggataacgccctccaatcgggtaactcccaggagagtgtcacagagcaggacagcaaggacagcacctacagcctcagcagcaccctgacgctgagcaaagcagactacgagaaacacaaagtctacgcctgcgaagtcacccatcagggcctgagctcgcccgtcacaaagagcttcaacaggggagagtgttga

SEQ ID NO: 700 - protein, 214 aa, artificial
  22G10 LC
EIVMTQSPVTLSLSLGERATLSCRASQSISSNLAWFQQKPGQAPRLLIYGAFTRATGIPARVSGSGSGTEFTLTISSLQSEDFAVYYCQQYNYWPLTFGGGTKVEIKRTVAAPSVFIFPPSDEQLKSGTASVVCLLNNFYPREAKVQWKVDNALQSGNSQESVTEQDSKDSTYSLSSTLTLSKADYEKHKVYACEVTHQGLSSPVTKSFNRGEC

SEQ ID NO: 701 - DNA, 639 bp, artificial
  23A10 LC
tcctatgagctgactcagccaccctcagtgtccgtgtccccaggacagacagccagcatcacctgctctggagatagattgggggagaaatatgtttgctggtatcagcagaagccaggccagtcccctatactggtcatctatcaagataataagtggccctcagggatccctgagcgattctctggctccaactctgggaacacagccactctgaccatcagcgggacccaggctatggatgaggctgactattactgtcaggcgtgggacagcagcactgtggtattcggcggggggaccaagctgaccgtcctaggtcagcccaaggctgccccctcggtcactctgttcccaccctcctctgaggagcttcaagccaacaaggccacactggtgtgtctcataagtgacttctacccgggagccgtgacagtggcctggaaggcagatagcagccccgtcaaggcgggagtggagaccaccacaccctccaaacaaagcaacaacaagtacgcggccagcagctatctgagcctgacgcctgagcagtggaagtcccacagaagctacagctgccaggtcacgcatgaagggagcaccgtggagaagacagtggcccctacagaatgttcatga

SEQ ID NO: 702 - protein, 212 aa, artificial
  23A10 LC
SYELTQPPSVSVSPGQTASITCSGDRLGEKYVCWYQQKPGQSPILVIYQDNKWPSGIPERFSGSNSGNTATLTISGTQAMDEADYYCQAWDSSTVVFGGGTKLTVLGQPKAAPSVTLFPPSSEELQANKATLVCLISDFYPGAVTVAWKADSSPVKAGVETTTPSKQSNNKYAASSYLSLTPEQWKSHRSYSCQVTHEGSTVEKTVAPTECS

SEQ ID NO: 703 - DNA, 651 bp, artificial
  25F8 LC
cagtctgcgctgactcagccaccctcagcgactgggacccccgggcagagggtcaccatctcttgttctggaagcagctccaacatcggaaggaattttgtaaactggtataagcagctcccaggaacggcccccaaagtcctcatttatactaataatcagcggccctcaggggtccctgaccgattctctggctccaagtctggcacctcagcctccctggccatcagtgggctccagtctgaggatgagtctgattattactgtgcagcatgggatgacagcctgaatggttgggtgttcggcggagggaccaagctgaccgtcctaggtcagcccaaggctgccccctcggtcactctgttcccaccctcctctgaggagcttcaagccaacaaggccacactggtgtgtctcataagtgacttctacccgggagccgtgacagtggcctggaaggcagatagcagccccgtcaaggcgggagtggagaccaccacaccctccaaacaaagcaacaacaagtacgcggccagcagctatctgagcctgacgcctgagcagtggaagtcccacagaagctacagctgccaggtcacgcatgaagggagcaccgtggagaagacagtggcccctacagaatgttcatga

SEQ ID NO: 704 - protein, 216 aa, artificial
  25F8 LC
QSALTQPPSATGTPGQRVTISCSGSSSNIGRNFVNWYKQLPGTAPKVLIYTNNQRPSGVPDRFSGSKSGTSASLAISGLQSEDESDYYCAAWDDSLNGWVFGGGTKLTVLGQPKAAPSVTLFPPSSEELQANKATLVCLISDFYPGAVTVAWKADSSPVKAGVETTTPSKQSNNKYAASSYLSLTPEQWKSHRSYSCQVTHEGSTVEKTVAPTECS

SEQ ID NO: 705 - DNA, 648 bp, artificial
  25G10 LC
gaaattgtgttgacgcagtctccaggcaccctgtctttgtctccaggggaaagagccaccctctcctgcagggccagtcagagtgttagcagcagctacttagcctggtaccagcagaaacctggccaggctcccaggctcctcatctttggtgcatccagcagggccactggcatcccagacaggttcagtggcagtgggtctgggacagacttcactctcaccatcagcagactggagcctgaagattttgcagtgtatcactgtcagcagtatggtaactcaccgctcactttcggcggagggaccaaggtggagatcaaacgaactgtggctgcaccatctgtcttcatcttcccgccatctgatgagcagttgaaatctggtaccgcctctgttgtgtgcctgctgaataacttctatcccagagaggccaaagtacagtggaaggtggataacgccctccaatcgggtaactcccaggagagtgtcacagagcaggacagcaaggacagcacctacagcctcagcagcaccctgacgctgagcaaagcagactacgagaaacacaaagtctacgcctgcgaagtcacccatcagggcctgagctcgcccgtcacaaagagcttcaacaggggagagtgttga

SEQ ID NO: 706 - protein, 215 aa, artificial
  25G10 LC
EIVLTQSPGTLSLSPGERATLSCRASQSVSSSYLAWYQQKPGQAPRLLIFGASSRATGIPDRFSGSGSGTDFTLTISRLEPEDFAVYHCQQYGNSPLTFGGGTKVEIKRTVAAPSVFIFPPSDEQLKSGTASVVCLLNNFYPREAKVQWKVDNALQSGNSQESVTEQDSKDSTYSLSSTLTLSKADYEKHKVYACEVTHQGLSSPVTKSFNRGEC

SEQ ID NO: 707 - DNA, 651 bp, artificial
  26D1 LC
cactctgtgctgactcagtcaccctcagcgtctgggacccccggacagagggtcaccatctcttgttctggaagccgctccaacatcggaagtaattttgtaaactggtaccagcagctcccaggaacggcccccaaactcctcatctatactaataatcagcggccctcaggggtccctgaccgattctctggctccaagtctggcacctcagcctccctggccatcagtgggctccagtctgaggatgaggctgattattactgtgcagtatgggatgacagcctgaatggttgggtgttcggcggagggaccaagctgaccgtcctaggtcagcccaaggctgccccctcggtcactctgttcccaccctcctctgaggagcttcaagccaacaaggccacactggtgtgtctcataagtgacttctacccgggagccgtgacagtggcctggaaggcagatagcagccccgtcaaggcgggagtggagaccaccacaccctccaaacaaagcaacaacaagtacgcggccagcagctatctgagcctgacgcctgagcagtggaagtcccacagaagctacagctgccaggtcacgcatgaagggagcaccgtggagaagacagtggcccctacagaatgttcatga

SEQ ID NO: 708 - protein, 216 aa, artificial
  26D1 LC
HSVLTQSPSASGTPGQRVTISCSGSRSNIGSNFVNWYQQLPGTAPKLLIYTNNQRPSGVPDRFSGSKSGTSASLAISGLQSEDEADYYCAVWDDSLNGWVFGGGTKLTVLGQPKAAPSVTLFPPSSEELQANKATLVCLISDFYPGAVTVAWKADSSPVKAGVETTTPSKQSNNKYAASSYLSLTPEQWKSHRSYSCQVTHEGSTVEKTVAPTECS

SEQ ID NO: 709 - DNA, 651 bp, artificial
  26F12 LC
cagtctgtgctgactcagtcaccctcagcgtctgggacccccgggcagaaggtcaccatctcttgttctggaagccgctccaacatcggaagtaattttgtaaactggtaccagcagctcccaggaacggcccccaaactcctcatctatactaattatcagcggccctcaggggtccctgaccgattctctggctccaagtctggcacctcagcctccctggccatcagtgggctccagtctgaggatgaggctgattattactgtgcagtatgggatgacagcctgaatggttgggtgttcggcggagggaccaagctgaccgtcctaggtcagcccaaggctgccccctcggtcactctgttcccaccctcctctgaggagcttcaagccaacaaggccacactggtgtgtctcataagtgacttctacccgggagccgtgacagtggcctggaaggcagatagcagccccgtcaaggcgggagtggagaccaccacaccctccaaacaaagcaacaacaagtacgcggccagcagctatctgagcctgacgcctgagcagtggaagtcccacagaagctacagctgccaggtcacgcatgaagggagcaccgtggagaagacagtggcccctacagaatgttcatga

SEQ ID NO: 710 - protein, 216 aa, artificial
  26F12 LC
QSVLTQSPSASGTPGQKVTISCSGSRSNIGSNFVNWYQQLPGTAPKLLIYTNYQRPSGVPDRFSGSKSGTSASLAISGLQSEDEADYYCAVWDDSLNGWVFGGGTKLTVLGQPKAAPSVTLFPPSSEELQANKATLVCLISDFYPGAVTVAWKADSSPVKAGVETTTPSKQSNNKYAASSYLSLTPEQWKSHRSYSCQVTHEGSTVEKTVAPTECS

SEQ ID NO: 711 - protein, 449 aa, artificial; identical to SEQ ID NO: 648
  [hu anti-<huCDH19> 4F3 VH]::huIgG1z

SEQ ID NO: 712 - protein, 446 aa, artificial; identical to SEQ ID NO: 644
  HC [hu anti-<huCDH19> 4A9 VH]::huIgG1z

SEQ ID NO: 713 - protein, 449 aa, artificial; identical to SEQ ID NO: 646
  HC [hu anti-<huCDH19> 4B10 VH]::huIgG1z

SEQ ID NO: 714 - protein, 452 aa, artificial; identical to SEQ ID NO: 656
  HC [hu anti-<huCDH19> 17H8.2 VH]::huIgG1z

SEQ ID NO: 715 - protein, 450 aa, artificial; identical to SEQ ID NO: 654
  HC [hu anti-<huCDH19> 16C1.1 VH]::huIgG1z

SEQ ID NO: 716 - protein, 455 aa, artificial; identical to SEQ ID NO: 652
  HC [hu anti-<huCDH19> 16A4.1 VH]::huIgG1z

SEQ ID NO: 717 - protein, 451 aa, artificial; identical to SEQ ID NO: 664
  HC [hu anti-<huCDH19> 22G10.1 VH]::huIgG1z

SEQ ID NO: 718 - protein, 450 aa, artificial; identical to SEQ ID NO: 660
  HC [hu anti-<huCDH19> 20D3.1 VH]::huIgG1z

SEQ ID NO: 719 - protein, 450 aa, artificial; identical to SEQ ID NO: 662
  HC [hu anti-<huCDH19> 22D1.1 VH]::huIgG1z

SEQ ID NO: 720 - protein, 450 aa, artificial; identical to SEQ ID NO: 668
  HC [hu anti-<huCDH19> 25F8.1 VH]::huIgG1z

SEQ ID NO: 721 - protein, 450 aa, artificial; identical to SEQ ID NO: 674
  HC [hu anti-<huCDH19> 26F12.1 VH]::huIgG1z

SEQ ID NO: 722 - protein, 450 aa, artificial; identical to SEQ ID NO: 672
  HC [hu anti-<huCDH19> 26D1.1 VH]::huIgG1z

SEQ ID NO: 723 - protein, 450 aa, artificial
  HC [hu anti-<huCDH19> 25G10.1 VH]::huIgG1z
QVQLQESGPGLVKPSETLSLTCTVSGGSISGYYWSWIRQPPGKGLEWIGYIYYIGSTNYNPSLKSRVTMSVDTSKNQFSLKLSSVTAADTAVYYCARDGSSGWYRWFDPWGQGTLVTVSSASTKGPSVFPLAPSSKSTSGGTAALGCLVKDYFPEPVTVSWNSGALTSGVHTFPAVLQSSGLYSLSSVVTVPSSSLGTQTYICNVNHKPSNTKVDKKVEPKSCDKTHTCPPCPAPELLGGPSVFLFPPKPKDTLMISRTPEVTCVVVDVSHEDPEVKFNWYVDGVEVHNAKTKPREEQYNSTYRVVSVLTVLHQDWLNGKEYKCKVSNKALPAPIEKTISKAKGQPREPQVYTLPPSREEMTKNQVSLTCLVKGFYPSDIAVEWESNGQPENNYKTTPPVLDSDGSFFLYSKLTVDKSRWQQGNVFSCSVMHEALHNHYTQKSLSLSPGK

SEQ ID NO: 724 - protein, 450 aa, artificial; identical to SEQ ID NO: 658
  HC [hu anti-<huCDH19> 19B5.1 VH]::huIgG1z

SEQ ID NO: 725 - protein, 450 aa, artificial; identical to SEQ ID NO: 642
  HC [hu anti-<huCDH19> 4A2 VH]::huIgG1z

SEQ ID NO: 726 - protein, 450 aa, artificial
  HC [hu anti-<huCDH19> 4A2 (1-472)(Q17E,H47P) VH]::huIgG1z
QVQLQESGPGLVKPSETLSLTCTVSGGSISSSGYYWSWIRQPPGKGLEWIGYIYYTGSAYYNPSLKSRVTISVDTSKNQFSLKLSSVTAADTAVYYCARDGSSGWYFQYWGQGTLVTVSSASTKGPSVFPLAPSSKSTSGGTAALGCLVKDYFPEPVTVSWNSGALTSGVHTFPAVLQSSGLYSLSSVVTVPSSSLGTQTYICNVNHKPSNTKVDKKVEPKSCDKTHTCPPCPAPELLGGPSVFLFPPKPKDTLMISRTPEVTCVVVDVSHEDPEVKFNWYVDGVEVHNAKTKPREEQYNSTYRVVSVLTVLHQDWLNGKEYKCKVSNKALPAPIEKTISKAKGQPREPQVYTLPPSREEMTKNQVSLTCLVKGFYPSDIAVEWESNGQPENNYKTTPPVLDSDGSFFLYSKLTVDKSRWQQGNVFSCSVMHEALHNHYTQKSLSLSPGK

SEQ ID NO: 727 - protein, 450 aa, artificial; identical to SEQ ID NO: 642
  HC [hu anti-<huCDH19> 4A2 VH]::huIgG1z

SEQ ID NO: 728 - protein, 450 aa, artificial; identical to SEQ ID NO: 726
  HC [hu anti-<huCDH19> 4A2 (1-472)(Q17E,H47P) VH]::huIgG1z

SEQ ID NO: 729 - protein, 450 aa, artificial
  HC [hu anti-<huCDH19> 4A2 (1-472)(Q17E,H47P,D111E) VH]::huIgG1z
QVQLQESGPGLVKPSETLSLTCTVSGGSISSSGYYWSWIRQPPGKGLEWIGYIYYTGSAYYNPSLKSRVTISVDTSKNQFSLKLSSVTAADTAVYYCAREGSSGWYFQYWGQGTLVTVSSASTKGPSVFPLAPSSKSTSGGTAALGCLVKDYFPEPVTVSWNSGALTSGVHTFPAVLQSSGLYSLSSVVTVPSSSLGTQTYICNVNHKPSNTKVDKKVEPKSCDKTHTCPPCPAPELLGGPSVFLFPPKPKDTLMISRTPEVTCVVVDVSHEDPEVKFNWYVDGVEVHNAKTKPREEQYNSTYRVVSVLTVLHQDWLNGKEYKCKVSNKALPAPIEKTISKAKGQPREPQVYTLPPSREEMTKNQVSLTCLVKGFYPSDIAVEWESNGQPENNYKTTPPVLDSDGSFFLYSKLTVDKSRWQQGNVFSCSVMHEALHNHYTQKSLSLSPGK

SEQ ID NO: 730 - protein, 450 aa, artificial
  HC [hu anti-<huCDH19> 4A2 (1-472)(Q17E,H47P,D111E,W134Y) VH]::huIgG1z
QVQLQESGPGLVKPSETLSLTCTVSGGSISSSGYYWSWIRQPPGKGLEWIGYIYYTGSAYYNPSLKSRVTISVDTSKNQFSLKLSSVTAADTAVYYCAREGSSGYYFQYWGQGTLVTVSSASTKGPSVFPLAPSSKSTSGGTAALGCLVKDYFPEPVTVSWNSGALTSGVHTFPAVLQSSGLYSLSSVVTVPSSSLGTQTYICNVNHKPSNTKVDKKVEPKSCDKTHTCPPCPAPELLGGPSVFLFPPKPKDTLMISRTPEVTCVVVDVSHEDPEVKFNWYVDGVEVHNAKTKPREEQYNSTYRVVSVLTVLHQDWLNGKEYKCKVSNKALPAPIEKTISKAKGQPREPQVYTLPPSREEMTKNQVSLTCLVKGFYPSDIAVEWESNGQPENNYKTTPPVLDSDGSFFLYSKLTVDKSRWQQGNVFSCSVMHEALHNHYTQKSLSLSPGK

SEQ ID NO: 731 - protein, 450 aa, artificial; identical to SEQ ID NO: 642
  HC [hu anti-<huCDH19> 4A2 VH]::huIgG1z

SEQ ID NO: 732 - protein, 449 aa, artificial
  HC [hu anti-<huCDH19> 4F3 (1-471)(R17G) VH]::huIgG1z
QVQLVESGGGVVQPGGSLRLSCAASGFSFSSYDMDWVRQTPGKGLEWVAVIWYDGSNKYYADSVRGRFTISRDNSKNTLFLQMNSLRVEDTAVYYCARETGEGWYFDLWGRGTLVTVSSASTKGPSVFPLAPSSKSTSGGTAALGCLVKDYFPEPVTVSWNSGALTSGVHTFPAVLQSSGLYSLSSVVTVPSSSLGTQTYICNVNHKPSNTKVDKKVEPKSCDKTHTCPPCPAPELLGGPSVFLFPPKPKDTLMISRTPEVTCVVVDVSHEDPEVKFNWYVDGVEVHNAKTKPREEQYNSTYRVVSVLTVLHQDWLNGKEYKCKVSNKALPAPIEKTISKAKGQPREPQVYTLPPSREEMTKNQVSLTCLVKGFYPSDIAVEWESNGQPENNYKTTPPVLDSDGSFFLYSKLTVDKSRWQQGNVFSCSVMHEALHNHYTQKSLSLSPGK

SEQ ID NO: 733 - protein, 449 aa, artificial
  HC [hu anti-<huCDH19> 4F3 (1-471)(R17G,T47A) VH]::huIgG1z
QVQLVESGGGVVQPGGSLRLSCAASGFSFSSYDMDWVRQAPGKGLEWVAVIWYDGSNKYYADSVRGRFTISRDNSKNTLFLQMNSLRVEDTAVYYCARETGEGWYFDLWGRGTLVTVSSASTKGPSVFPLAPSSKSTSGGTAALGCLVKDYFPEPVTVSWNSGALTSGVHTFPAVLQSSGLYSLSSVVTVPSSSLGTQTYICNVNHKPSNTKVDKKVEPKSCDKTHTCPPCPAPELLGGPSVFLFPPKPKDTLMISRTPEVTCVVVDVSHEDPEVKFNWYVDGVEVHNAKTKPREEQYNSTYRVVSVLTVLHQDWLNGKEYKCKVSNKALPAPIEKTISKAKGQPREPQVYTLPPSREEMTKNQVSLTCLVKGFYPSDIAVEWESNGQPENNYKTTPPVLDSDGSFFLYSKLTVDKSRWQQGNVFSCSVMHEALHNHYTQKSLSLSPGK

SEQ ID NO: 734 - protein, 449 aa, artificial
  HC [hu anti-<huCDH19> 4F3 (1-471)(R17G,T47A,R141Q) VH]::huIgG1z
QVQLVESGGGVVQPGGSLRLSCAASGFSFSSYDMDWVRQAPGKGLEWVAVIWYDGSNKYYADSVRGRFTISRDNSKNTLFLQMNSLRVEDTAVYYCARETGEGWYFDLWGQGTLVTVSSASTKGPSVFPLAPSSKSTSGGTAALGCLVKDYFPEPVTVSWNSGALTSGVHTFPAVLQSSGLYSLSSVVTVPSSSLGTQTYICNVNHKPSNTKVDKKVEPKSCDKTHTCPPCPAPELLGGPSVFLFPPKPKDTLMISRTPEVTCVVVDVSHEDPEVKFNWYVDGVEVHNAKTKPREEQYNSTYRVVSVLTVLHQDWLNGKEYKCKVSNKALPAPIEKTISKAKGQPREPQVYTLPPSREEMTKNQVSLTCLVKGFYPSDIAVEWESNGQPENNYKTTPPVLDSDGSFFLYSKLTVDKSRWQQGNVFSCSVMHEALHNHYTQKSLSLSPGK

SEQ ID NO: 735 - protein, 449 aa, artificial
  HC [hu anti-<huCDH19> 4F3 (1-471)(R17G,T47A,D61E,D72E,R141Q) VH]::huIgG1z
QVQLVESGGGVVQPGGSLRLSCAASGFSFSSYDMDWVRQAPGKGLEWVAVIWYEGSNKYYAESVRGRFTISRDNSKNTLFLQMNSLRVEDTAVYYCARETGEGWYFDLWGQGTLVTVSSASTKGPSVFPLAPSSKSTSGGTAALGCLVKDYFPEPVTVSWNSGALTSGVHTFPAVLQSSGLYSLSSVVTVPSSSLGTQTYICNVNHKPSNTKVDKKVEPKSCDKTHTCPPCPAPELLGGPSVFLFPPKPKDTLMISRTPEVTCVVVDVSHEDPEVKFNWYVDGVEVHNAKTKPREEQYNSTYRVVSVLTVLHQDWLNGKEYKCKVSNKALPAPIEKTISKAKGQPREPQVYTLPPSREEMTKNQVSLTCLVKGFYPSDIAVEWESNGQPENNYKTTPPVLDSDGSFFLYSKLTVDKSRWQQGNVFSCSVMHEALHNHYTQKSLSLSPGK

SEQ ID NO: 736 - protein, 449 aa, artificial
  HC [hu anti-<huCDH19> 4F3 (1-471)(R17G,T47A,D61E,D72E,W134Y,R141Q) VH]::huIgG1z
QVQLVESGGGVVQPGGSLRLSCAASGFSFSSYDMDWVRQAPGKGLEWVAVIWYEGSNKYYAESVRGRFTISRDNSKNTLFLQMNSLRVEDTAVYYCARETGEGYYFDLWGQGTLVTVSSASTKGPSVFPLAPSSKSTSGGTAALGCLVKDYFPEPVTVSWNSGALTSGVHTFPAVLQSSGLYSLSSVVTVPSSSLGTQTYICNVNHKPSNTKVDKKVEPKSCDKTHTCPPCPAPELLGGPSVFLFPPKPKDTLMISRTPEVTCVVVDVSHEDPEVKFNWYVDGVEVHNAKTKPREEQYNSTYRVVSVLTVLHQDWLNGKEYKCKVSNKALPAPIEKTISKAKGQPREPQVYTLPPSREEMTKNQVSLTCLVKGFYPSDIAVEWESNGQPENNYKTTPPVLDSDGSFFLYSKLTVDKSRWQQGNVFSCSVMHEALHNHYTQKSLSLSPGK

SEQ ID NO: 737 - protein, 455 aa, artificial
  HC [hu anti-<huCDH19> 2G6 (1-477)(R17G,D61E,D72E,K94N) VH]::huIgG1z
QVQLVESGGGVVQPGGSLRLSCAASGFTFSSYGMHWVRQAPGKGLEWVAFIWYEGSNKYYAESVKDRFTISRDNSKNTLYLQMNSLRAEDTAVYYCARRAGIIGTIGYYYGMDVWGQGTTVTVSSASTKGPSVFPLAPSSKSTSGGTAALGCLVKDYFPEPVTVSWNSGALTSGVHTFPAVLQSSGLYSLSSVVTVPSSSLGTQTYICNVNHKPSNTKVDKKVEPKSCDKTHTCPPCPAPELLGGPSVFLFPPKPKDTLMISRTPEVTCVVVDVSHEDPEVKFNWYVDGVEVHNAKTKPREEQYNSTYRVVSVLTVLHQDWLNGKEYKCKVSNKALPAPIEKTISKAKGQPREPQVYTLPPSREEMTKNQVSLTCLVKGFYPSDIAVEWESNGQPENNYKTTPPVLDSDGSFFLYSKLTVDKSRWQQGNVFSCSVMHEALHNHYTQKSLSLSPGK

SEQ ID NO: 738 - protein, 450 aa, artificial; identical to SEQ ID NO: 654
  HC [hu anti-<huCDH19> 16C1.1 VH]::huIgG1z

SEQ ID NO: 739 - protein, 450 aa, artificial
  HC [hu anti-<huCDH19> 16C1.1 (1-469)(T92K) VH]::huIgG1z
QVQLQESGPGLVKPSETLSLTCTVSGGSISGYYWSWIRQPPGKGLEWIGYIYYIGSTNYNPSLKSRVTMSIDTSKNQFSLKLSSLTAADTAVYFCARDGSSGWYRWFDPWGQGTLVTVSSASTKGPSVFPLAPSSKSTSGGTAALGCLVKDYFPEPVTVSWNSGALTSGVHTFPAVLQSSGLYSLSSVVTVPSSSLGTQTYICNVNHKPSNTKVDKKVEPKSCDKTHTCPPCPAPELLGGPSVFLFPPKPKDTLMISRTPEVTCVVVDVSHEDPEVKFNWYVDGVEVHNAKTKPREEQYNSTYRVVSVLTVLHQDWLNGKEYKCKVSNKALPAPIEKTISKAKGQPREPQVYTLPPSREEMTKNQVSLTCLVKGFYPSDIAVEWESNGQPENNYKTTPPVLDSDGSFFLYSKLTVDKSRWQQGNVFSCSVMHEALHNHYTQKSLSLSPGK

SEQ ID NO: 740 - protein, 450 aa, artificial
  HC [hu anti-<huCDH19> 16C1.1 (1-469)(T92K,D109E) VH]::huIgG1z
QVQLQESGPGLVKPSETLSLTCTVSGGSISGYYWSWIRQPPGKGLEWIGYIYYIGSTNYNPSLKSRVTMSIDTSKNQFSLKLSSLTAADTAVYFCAREGSSGWYRWFDPWGQGTLVTVSSASTKGPSVFPLAPSSKSTSGGTAALGCLVKDYFPEPVTVSWNSGALTSGVHTFPAVLQSSGLYSLSSVVTVPSSSLGTQTYICNVNHKPSNTKVDKKVEPKSCDKTHTCPPCPAPELLGGPSVFLFPPKPKDTLMISRTPEVTCVVVDVSHEDPEVKFNWYVDGVEVHNAKTKPREEQYNSTYRVVSVLTVLHQDWLNGKEYKCKVSNKALPAPIEKTISKAKGQPREPQVYTLPPSREEMTKNQVSLTCLVKGFYPSDIAVEWESNGQPENNYKTTPPVLDSDGSFFLYSKLTVDKSRWQQGNVFSCSVMHEALHNHYTQKSLSLSPGK

SEQ ID NO: 741 - protein, 450 aa, artificial
  HC [hu anti-<huCDH19> 16C1.1 (1-469)(T92K,W132Y,W135Y) VH]::huIgG1z
QVQLQESGPGLVKPSETLSLTCTVSGGSISGYYWSWIRQPPGKGLEWIGYIYYIGSTNYNPSLKSRVTMSIDTSKNQFSLKLSSLTAADTAVYFCARDGSSGYYRYFDPWGQGTLVTVSSASTKGPSVFPLAPSSKSTSGGTAALGCLVKDYFPEPVTVSWNSGALTSGVHTFPAVLQSSGLYSLSSVVTVPSSSLGTQTYICNVNHKPSNTKVDKKVEPKSCDKTHTCPPCPAPELLGGPSVFLFPPKPKDTLMISRTPEVTCVVVDVSHEDPEVKFNWYVDGVEVHNAKTKPREEQYNSTYRVVSVLTVLHQDWLNGKEYKCKVSNKALPAPIEKTISKAKGQPREPQVYTLPPSREEMTKNQVSLTCLVKGFYPSDIAVEWESNGQPENNYKTTPPVLDSDGSFFLYSKLTVDKSRWQQGNVFSCSVMHEALHNHYTQKSLSLSPGK

SEQ ID NO: 742 - protein, 450 aa, artificial; identical to SEQ ID NO: 739
  HC [hu anti-<huCDH19> 16C1.1 (1-469)(T92K) VH]::huIgG1z

SEQ ID NO: 743 - protein, 452 aa, artificial; identical to SEQ ID NO: 656
  HC [hu anti-<huCDH19> 17H8.2 VH]::huIgG1z

SEQ ID NO: 744 - protein, 452 aa, artificial
  HC [hu anti-<huCDH19> 17H8.2 (1-471)(D109E) VH]::huIgG1z
QVQLQESGPGLVKPSETLSLTCTVSGGSINSYYWSWIRQPPGKGLEWIGYIYYIGSTNYNPSLKSRVTISVDTSKNQFSLKLSSVTAADTALYYCARESRYRSGWYDAFDIWGQGTMVTVSSASTKGPSVFPLAPSSKSTSGGTAALGCLVKDYFPEPVTVSWNSGALTSGVHTFPAVLQSSGLYSLSSVVTVPSSSLGTQTYICNVNHKPSNTKVDKKVEPKSCDKTHTCPPCPAPELLGGPSVFLFPPKPKDTLMISRTPEVTCVVVDVSHEDPEVKFNWYVDGVEVHNAKTKPREEQYNSTYRVVSVLTVLHQDWLNGKEYKCKVSNKALPAPIEKTISKAKGQPREPQVYTLPPSREEMTKNQVSLTCLVKGFYPSDIAVEWESNGQPENNYKTTPPVLDSDGSFFLYSKLTVDKSRWQQGNVFSCSVMHEALHNHYTQKSLSLSPGK

SEQ ID NO: 745 - protein, 452 aa, artificial
  HC [hu anti-<huCDH19> 17H8.2 (1-471)(D109E,W132Y) VH]::huIgG1z
QVQLQESGPGLVKPSETLSLTCTVSGGSINSYYWSWIRQPPGKGLEWIGYIYYIGSTNYNPSLKSRVTISVDTSKNQFSLKLSSVTAADTALYYCARESRYRSGYYDAFDIWGQGTMVTVSSASTKGPSVFPLAPSSKSTSGGTAALGCLVKDYFPEPVTVSWNSGALTSGVHTFPAVLQSSGLYSLSSVVTVPSSSLGTQTYICNVNHKPSNTKVDKKVEPKSCDKTHTCPPCPAPELLGGPSVFLFPPKPKDTLMISRTPEVTCVVVDVSHEDPEVKFNWYVDGVEVHNAKTKPREEQYNSTYRVVSVLTVLHQDWLNGKEYKCKVSNKALPAPIEKTISKAKGQPREPQVYTLPPSREEMTKNQVSLTCLVKGFYPSDIAVEWESNGQPENNYKTTPPVLDSDGSFFLYSKLTVDKSRWQQGNVFSCSVMHEALHNHYTQKSLSLSPGK

SEQ ID NO: 746 - protein, 452 aa, artificial; identical to SEQ ID NO: 744
  HC [hu anti-<huCDH19> 17H8.2 (1-471)(D109E) VH]::huIgG1z

SEQ ID NO: 747 - protein, 446 aa, artificial; identical to SEQ ID NO: 650
  HC [hu anti-<huCDH19> 4F7 VH]::huIgG1z

SEQ ID NO: 748 - protein, 446 aa, artificial; identical to SEQ ID NO: 650
  HC [hu anti-<huCDH19> 4F7 VH]::huIgG1z

SEQ ID NO: 749 - protein, 446 aa, artificial
  HC [hu anti-<huCDH19> 4F7 (1-468)(W113Y) VH]::huIgG1z
QVQLQESGPGLVKPSETLSLTCTVSGGSISSYSWSWIRQPPGKGLEWIGYIYYSGSTNYNPSLKSRVTISLDTSKNQFSLKLSSVTAADTAVYYCARNYAFHFDYWGQGTLVTVSSASTKGPSVFPLAPSSKSTSGGTAALGCLVKDYFPEPVTVSWNSGALTSGVHTFPAVLQSSGLYSLSSVVTVPSSSLGTQTYICNVNHKPSNTKVDKKVEPKSCDKTHTCPPCPAPELLGGPSVFLFPPKPKDTLMISRTPEVTCVVVDVSHEDPEVKFNWYVDGVEVHNAKTKPREEQYNSTYRVVSVLTVLHQDWLNGKEYKCKVSNKALPAPIEKTISKAKGQPREPQVYTLPPSREEMTKNQVSLTCLVKGFYPSDIAVEWESNGQPENNYKTTPPVLDSDGSFFLYSKLTVDKSRWQQGNVFSCSVMHEALHNHYTQKSLSLSPGK

SEQ ID NO: 750 - protein, 449 aa, artificial
  HC [hu anti-<huCDH19> 4B10 (1-471)(R17G,D61E,D72E,W134Y) VH]::huIgG1z
QVQLVESGGGVVQPGGSLRLSCAASGFTFSSYDMHWVRQAPGKGLEWVAVISYEGTNEYYAESVKGRFTISRDTSKNTLYLQMNSLRAEDTAVYYCARERYFDYSFDYWGQGTLVSVSSASTKGPSVFPLAPSSKSTSGGTAALGCLVKDYFPEPVTVSWNSGALTSGVHTFPAVLQSSGLYSLSSVVTVPSSSLGTQTYICNVNHKPSNTKVDKKVEPKSCDKTHTCPPCPAPELLGGPSVFLFPPKPKDTLMISRTPEVTCVVVDVSHEDPEVKFNWYVDGVEVHNAKTKPREEQYNSTYRVVSVLTVLHQDWLNGKEYKCKVSNKALPAPIEKTISKAKGQPREPQVYTLPPSREEMTKNQVSLTCLVKGFYPSDIAVEWESNGQPENNYKTTPPVLDSDGSFFLYSKLTVDKSRWQQGNVFSCSVMHEALHNHYTQKSLSLSPGK

SEQ ID NO: 751 - protein, 449 aa, artificial; identical to SEQ ID NO: 646
  HC [hu anti-<huCDH19> 4B10 VH]::huIgG1z

SEQ ID NO: 752 - protein, 449 aa, artificial
  HC [hu anti-<huCDH19> 4B10 (1-471)(R17G) VH]::huIgG1z
QVQLVESGGGVVQPGGSLRLSCAASGFTFSSYDMHWVRQAPGKGLEWVAVISYDGTNEYYADSVKGRFTISRDTSKNTLYLQMNSLRAEDTAVYYCARERYFDWSFDYWGQGTLVSVSSASTKGPSVFPLAPSSKSTSGGTAALGCLVKDYFPEPVTVSWNSGALTSGVHTFPAVLQSSGLYSLSSVVTVPSSSLGTQTYICNVNHKPSNTKVDKKVEPKSCDKTHTCPPCPAPELLGGPSVFLFPPKPKDTLMISRTPEVTCVVVDVSHEDPEVKFNWYVDGVEVHNAKTKPREEQYNSTYRVVSVLTVLHQDWLNGKEYKCKVSNKALPAPIEKTISKAKGQPREPQVYTLPPSREEMTKNQVSLTCLVKGFYPSDIAVEWESNGQPENNYKTTPPVLDSDGSFFLYSKLTVDKSRWQQGNVFSCSVMHEALHNHYTQKSLSLSPGK

SEQ ID NO: 753 - protein, 449 aa, artificial
  HC [hu anti-<huCDH19> 4B10 (1-471)(R17G,D61E,D72E) VH]::huIgG1z
QVQLVESGGGVVQPGGSLRLSCAASGFTFSSYDMHWVRQAPGKGLEWVAVISYEGTNEYYAESVKGRFTISRDTSKNTLYLQMNSLRAEDTAVYYCARERYFDWSFDYWGQGTLVSVSSASTKGPSVFPLAPSSKSTSGGTAALGCLVKDYFPEPVTVSWNSGALTSGVHTFPAVLQSSGLYSLSSVVTVPSSSLGTQTYICNVNHKPSNTKVDKKVEPKSCDKTHTCPPCPAPELLGGPSVFLFPPKPKDTLMISRTPEVTCVVVDVSHEDPEVKFNWYVDGVEVHNAKTKPREEQYNSTYRVVSVLTVLHQDWLNGKEYKCKVSNKALPAPIEKTISKAKGQPREPQVYTLPPSREEMTKNQVSLTCLVKGFYPSDIAVEWESNGQPENNYKTTPPVLDSDGSFFLYSKLTVDKSRWQQGNVFSCSVMHEALHNHYTQKSLSLSPGK

SEQ ID NO: 754 - protein, 446 aa, artificial; identical to SEQ ID NO: 644
  HC [hu anti-<huCDH19> 4A9 VH]::huIgG1z

SEQ ID NO: 755 - protein, 446 aa, artificial
  HC [hu anti-<huCDH19> 4A9 (1-468)(F55I,A56G) VH]::huIgG1z
QVQLQESGPGLVKPSETLSLTCTVSGGSISGYYWSWIRQPPGKGLEWIGYFSYSGSTNYNPSLKSRVTLSVDTSKNQFSLKLSSVTAADTAVYYCARNWAFHFDFWGQGTLVTVSSASTKGPSVFPLAPSSKSTSGGTAALGCLVKDYFPEPVTVSWNSGALTSGVHTFPAVLQSSGLYSLSSVVTVPSSSLGTQTYICNVNHKPSNTKVDKKVEPKSCDKTHTCPPCPAPELLGGPSVFLFPPKPKDTLMISRTPEVTCVVVDVSHEDPEVKFNWYVDGVEVHNAKTKPREEQYNSTYRVVSVLTVLHQDWLNGKEYKCKVSNKALPAPIEKTISKAKGQPREPQVYTLPPSREEMTKNQVSLTCLVKGFYPSDIAVEWESNGQPENNYKTTPPVLDSDGSFFLYSKLTVDKSRWQQGNVFSCSVMHEALHNHYTQKSLSLSPGK

SEQ ID NO: 756 - protein, 446 aa, artificial; identical to SEQ ID NO: 755
  HC [hu anti-<huCDH19> 4A9 (1-468)(F55I,A56G) VH]::huIgG1z

SEQ ID NO: 757 - protein, 446 aa, artificial
  HC [hu anti-<huCDH19> 4A9 (1-468)(F55I,A56G,W113Y) VH]::huIgG1z
QVQLQESGPGLVKPSETLSLTCTVSGGSISGYYWSWIRQPPGKGLEWIGYFSYSGSTNYNPSLKSRVTLSVDTSKNQFSLKLSSVTAADTAVYYCARNYAFHFDFWGQGTLVTVSSASTKGPSVFPLAPSSKSTSGGTAALGCLVKDYFPEPVTVSWNSGALTSGVHTFPAVLQSSGLYSLSSVVTVPSSSLGTQTYICNVNHKPSNTKVDKKVEPKSCDKTHTCPPCPAPELLGGPSVFLFPPKPKDTLMISRTPEVTCVVVDVSHEDPEVKFNWYVDGVEVHNAKTKPREEQYNSTYRVVSVLTVLHQDWLNGKEYKCKVSNKALPAPIEKTISKAKGQPREPQVYTLPPSREEMTKNQVSLTCLVKGFYPSDIAVEWESNGQPENNYKTTPPVLDSDGSFFLYSKLTVDKSRWQQGNVFSCSVMHEALHNHYTQKSLSLSPGK

SEQ ID NO: 758 - protein, 450 aa, artificial; identical to SEQ ID NO: 660
  HC [hu anti-<huCDH19> 20D3.1 VH]::huIgG1z

SEQ ID NO: 759 - protein, 450 aa, artificial; identical to SEQ ID NO: 660
  HC [hu anti-<huCDH19> 20D3.1 VH]::huIgG1z

SEQ ID NO: 760 - protein, 450 aa, artificial
  HC [hu anti-<huCDH19> 20D3.1 (1-469)(W133Y) VH]::huIgG1z
QVQLVQSGAEVKKPGASVKVSCKVSGYTFTSYFIHWVRQAPGQGLEWMGIINPISVSTSYAQKFQGRVTMTRDTSTSTVFMELSSLRSEDTAVYYCARGGIQLYLHFDYWGQGTLVTVSSASTKGPSVFPLAPSSKSTSGGTAALGCLVKDYFPEPVTVSWNSGALTSGVHTFPAVLQSSGLYSLSSVVTVPSSSLGTQTYICNVNHKPSNTKVDKKVEPKSCDKTHTCPPCPAPELLGGPSVFLFPPKPKDTLMISRTPEVTCVVVDVSHEDPEVKFNWYVDGVEVHNAKTKPREEQYNSTYRVVSVLTVLHQDWLNGKEYKCKVSNKALPAPIEKTISKAKGQPREPQVYTLPPSREEMTKNQVSLTCLVKGFYPSDIAVEWESNGQPENNYKTTPPVLDSDGSFFLYSKLTVDKSRWQQGNVFSCSVMHEALHNHYTQKSLSLSPGK

SEQ ID NO: 761 - protein, 450 aa, artificial; identical to SEQ ID NO: 760
  HC [hu anti-<huCDH19> 20D3.1 (1-469)(W133Y) VH]::huIgG1z

SEQ ID NO: 762 - protein, 450 aa, artificial; identical to SEQ ID NO: 760
  HC [hu anti-<huCDH19> 20D3.1 (1-469)(W133Y) VH]::huIgG1z

SEQ ID NO: 763 - protein, 451 aa, artificial
  HC [hu anti-<huCDH19> 22G10.1 (1-470)(S82R,A99E) VH]::huIgG1z
EVQLLESGGGLVQPGGSLRLSCAASGFTFSSYAMNWVRQAPGKGLEWVSTISGGGANTYYADSVKGRFTISRDNSKSTLYLQMNSLRAEDTAVYHCAKGGMGGYYYGMDVWGQGTTVTVSSASTKGPSVFPLAPSSKSTSGGTAALGCLVKDYFPEPVTVSWNSGALTSGVHTFPAVLQSSGLYSLSSVVTVPSSSLGTQTYICNVNHKPSNTKVDKKVEPKSCDKTHTCPPCPAPELLGGPSVFLFPPKPKDTLMISRTPEVTCVVVDVSHEDPEVKFNWYVDGVEVHNAKTKPREEQYNSTYRVVSVLTVLHQDWLNGKEYKCKVSNKALPAPIEKTISKAKGQPREPQVYTLPPSREEMTKNQVSLTCLVKGFYPSDIAVEWESNGQPENNYKTTPPVLDSDGSFFLYSKLTVDKSRWQQGNVFSCSVMHEALHNHYTQKSLSLSPGK

SEQ ID NO: 764 - protein, 451 aa, artificial
  HC [hu anti-<huCDH19> 22G10.1 (1-470)(A99E,H105Y) VH]::huIgG1z
EVQLLESGGGLVQPGGSLRLSCAASGFTFSSYAMNWVRQAPGKGLEWVSTISGGGANTYYADSVKGRFTISSDNSKSTLYLQMNSLRAEDTAVYYCAKGGMGGYYYGMDVWGQGTTVTVSSASTKGPSVFPLAPSSKSTSGGTAALGCLVKDYFPEPVTVSWNSGALTSGVHTFPAVLQSSGLYSLSSVVTVPSSSLGTQTYICNVNHKPSNTKVDKKVEPKSCDKTHTCPPCPAPELLGGPSVFLFPPKPKDTLMISRTPEVTCVVVDVSHEDPEVKFNWYVDGVEVHNAKTKPREEQYNSTYRVVSVLTVLHQDWLNGKEYKCKVSNKALPAPIEKTISKAKGQPREPQVYTLPPSREEMTKNQVSLTCLVKGFYPSDIAVEWESNGQPENNYKTTPPVLDSDGSFFLYSKLTVDKSRWQQGNVFSCSVMHEALHNHYTQKSLSLSPGK

SEQ ID NO: 765 - protein, 451 aa, artificial
  HC [hu anti-<huCDH19> 22G10.1 (1-470)(A99E) VH]::huIgG1z
EVQLLESGGGLVQPGGSLRLSCAASGFTFSSYAMNWVRQAPGKGLEWVSTISGGGANTYYADSVKGRFTISSDNSKSTLYLQMNSLRAEDTAVYHCAKGGMGGYYYGMDVWGQGTTVTVSSASTKGPSVFPLAPSSKSTSGGTAALGCLVKDYFPEPVTVSWNSGALTSGVHTFPAVLQSSGLYSLSSVVTVPSSSLGTQTYICNVNHKPSNTKVDKKVEPKSCDKTHTCPPCPAPELLGGPSVFLFPPKPKDTLMISRTPEVTCVVVDVSHEDPEVKFNWYVDGVEVHNAKTKPREEQYNSTYRVVSVLTVLHQDWLNGKEYKCKVSNKALPAPIEKTISKAKGQPREPQVYTLPPSREEMTKNQVSLTCLVKGFYPSDIAVEWESNGQPENNYKTTPPVLDSDGSFFLYSKLTVDKSRWQQGNVFSCSVMHEALHNHYTQKSLSLSPGK

SEQ ID NO: 766 - protein, 451 aa, artificial; identical to SEQ ID NO: 765
  HC [hu anti-<huCDH19> 22G10.1 (1-470)(A99E) VH]::huIgG1z

SEQ ID NO: 767 - protein, 451 aa, artificial
  HC [hu anti-<huCDH19> 22G10.1 (1-470)(D72E,A99E) VH]::huIgG1z
EVQLLESGGGLVQPGGSLRLSCAASGFTFSSYAMNWVRQAPGKGLEWVSTISGGGANTYYAESVKGRFTISSDNSKSTLYLQMNSLRAEDTAVYHCAKGGMGGYYYGMDVWGQGTTVTVSSASTKGPSVFPLAPSSKSTSGGTAALGCLVKDYFPEPVTVSWNSGALTSGVHTFPAVLQSSGLYSLSSVVTVPSSSLGTQTYICNVNHKPSNTKVDKKVEPKSCDKTHTCPPCPAPELLGGPSVFLFPPKPKDTLMISRTPEVTCVVVDVSHEDPEVKFNWYVDGVEVHNAKTKPREEQYNSTYRVVSVLTVLHQDWLNGKEYKCKVSNKALPAPIEKTISKAKGQPREPQVYTLPPSREEMTKNQVSLTCLVKGFYPSDIAVEWESNGQPENNYKTTPPVLDSDGSFFLYSKLTVDKSRWQQGNVFSCSVMHEALHNHYTQKSLSLSPGK

SEQ ID NO: 768 - protein, 451 aa, artificial
  HC [hu anti-<huCDH19> 22G10.1 (1-470)(H105Y) VH]::huIgG1z
EVQLLESGGGLVQPGGSLRLSCAASGFTFSSYAMNWVRQAPGKGLEWVSTISGGGANTYYADSVKGRFTISSDNSKSTLYLQMNSLRAADTAVYYCAKGGMGGYYYGMDVWGQGTTVTVSSASTKGPSVFPLAPSSKSTSGGTAALGCLVKDYFPEPVTVSWNSGALTSGVHTFPAVLQSSGLYSLSSVVTVPSSSLGTQTYICNVNHKPSNTKVDKKVEPKSCDKTHTCPPCPAPELLGGPSVFLFPPKPKDTLMISRTPEVTCVVVDVSHEDPEVKFNWYVDGVEVHNAKTKPREEQYNSTYRVVSVLTVLHQDWLNGKEYKCKVSNKALPAPIEKTISKAKGQPREPQVYTLPPSREEMTKNQVSLTCLVKGFYPSDIAVEWESNGQPENNYKTTPPVLDSDGSFFLYSKLTVDKSRWQQGNVFSCSVMHEALHNHYTQKSLSLSPGK

SEQ ID NO: 769 - protein, 455 aa, artificial
  HC [hu anti-<huCDH19> 16A4.1 (1-474)(T144L) VH]::huIgG1z
QVQLQESGPGLAKPSETLSLTCTVSGDSITSYYWSWIRQPPGKGLEWIGYIYYSGSTNYNPSLKSRVTISVDTSKNQFSLKLSSVTAADTAVYYCARDQRRIAAAGTHFYGMDVWGQGTLVTVSSASTKGPSVFPLAPSSKSTSGGTAALGCLVKDYFPEPVTVSWNSGALTSGVHTFPAVLQSSGLYSLSSVVTVPSSSLGTQTYICNVNHKPSNTKVDKKVEPKSCDKTHTCPPCPAPELLGGPSVFLFPPKPKDTLMISRTPEVTCVVVDVSHEDPEVKFNWYVDGVEVHNAKTKPREEQYNSTYRVVSVLTVLHQDWLNGKEYKCKVSNKALPAPIEKTISKAKGQPREPQVYTLPPSREEMTKNQVSLTCLVKGFYPSDIAVEWESNGQPENNYKTTPPVLDSDGSFFLYSKLTVDKSRWQQGNVFSCSVMHEALHNHYTQKSLSLSPGK

SEQ ID NO: 770 - protein, 450 aa, artificial; identical to SEQ ID NO: 658
  HC [hu anti-<huCDH19> 19B5.1 VH]::huIgG1z

SEQ ID NO: 771 - protein, 450 aa, artificial
  HC [hu anti-<huCDH19> 19B5.1 (1-469)(W133Y) VH]::huIgG1z
QVQLVQSGAEVKKPGASVKVSCKVSGYTFTSYFIHWVRQAPGQGLEWMGIINPISVSTSYAQKFQGRVTMTRDTSTSTVFMELSSLRSEDTAVYYCARGGIQLYLHLDYWGQGTLVTVSSASTKGPSVFPLAPSSKSTSGGTAALGCLVKDYFPEPVTVSWNSGALTSGVHTFPAVLQSSGLYSLSSVVTVPSSSLGTQTYICNVNHKPSNTKVDKKVEPKSCDKTHTCPPCPAPELLGGPSVFLFPPKPKDTLMISRTPEVTCVVVDVSHEDPEVKFNWYVDGVEVHNAKTKPREEQYNSTYRVVSVLTVLHQDWLNGKEYKCKVSNKALPAPIEKTISKAKGQPREPQVYTLPPSREEMTKNQVSLTCLVKGFYPSDIAVEWESNGQPENNYKTTPPVLDSDGSFFLYSKLTVDKSRWQQGNVFSCSVMHEALHNHYTQKSLSLSPGK

SEQ ID NO: 772 - protein, 450 aa, artificial; identical to SEQ ID NO: 658
  HC [hu anti-<huCDH19> 19B5.1 VH]::huIgG1z

SEQ ID NO: 773 - protein, 450 aa, artificial; identical to SEQ ID NO: 658
  HC [hu anti-<huCDH19> 19B5.1 VH]::huIgG1z

SEQ ID NO: 774 - protein, 450 aa, artificial; identical to SEQ ID NO: 771
  HC [hu anti-<huCDH19> 19B5.1 (1-469)(W133Y) VH]::huIgG1z

SEQ ID NO: 775 - protein, 455 aa, artificial
  HC [hu anti-<huCDH19> 23A10.3 (1-474)(L92Q) VH]::huIgG1z
QVQLVESGGGVVQPGRSLRLSCAASGFTFSRYGIHWVRQAPGKGLEWVAVIWYDGSNKYYADSVKGRFTISRDNSKNTLYLQMNSLRAEDSAVYYCARRAGIPGTTGYYYGMDVWGQGTTVTVSSASTKGPSVFPLAPSSKSTSGGTAALGCLVKDYFPEPVTVSWNSGALTSGVHTFPAVLQSSGLYSLSSVVTVPSSSLGTQTYICNVNHKPSNTKVDKKVEPKSCDKTHTCPPCPAPELLGGPSVFLFPPKPKDTLMISRTPEVTCVVVDVSHEDPEVKFNWYVDGVEVHNAKTKPREEQYNSTYRVVSVLTVLHQDWLNGKEYKCKVSNKALPAPIEKTISKAKGQPREPQVYTLPPSREEMTKNQVSLTCLVKGFYPSDIAVEWESNGQPENNYKTTPPVLDSDGSFFLYSKLTVDKSRWQQGNVFSCSVMHEALHNHYTQKSLSLSPGK

SEQ ID NO: 776 - protein, 455 aa, artificial
  HC [hu anti-<huCDH19> 23A10.3 (1-474)(R17G,L92Q) VH]::huIgG1z
QVQLVESGGGVVQPGGSLRLSCAASGFTFSRYGIHWVRQAPGKGLEWVAVIWYDGSNKYYADSVKGRFTISRDNSKNTLYLQMNSLRAEDSAVYYCARRAGIPGTTGYYYGMDVWGQGTTVTVSSASTKGPSVFPLAPSSKSTSGGTAALGCLVKDYFPEPVTVSWNSGALTSGVHTFPAVLQSSGLYSLSSVVTVPSSSLGTQTYICNVNHKPSNTKVDKKVEPKSCDKTHTCPPCPAPELLGGPSVFLFPPKPKDTLMISRTPEVTCVVVDVSHEDPEVKFNWYVDGVEVHNAKTKPREEQYNSTYRVVSVLTVLHQDWLNGKEYKCKVSNKALPAPIEKTISKAKGQPREPQVYTLPPSREEMTKNQVSLTCLVKGFYPSDIAVEWESNGQPENNYKTTPPVLDSDGSFFLYSKLTVDKSRWQQGNVFSCSVMHEALHNHYTQKSLSLSPGK

SEQ ID NO: 777 - protein, 455 aa, artificial
  HC [hu anti-<huCDH19> 23A10.3 (1-474)(R17G,D61E,D72E,L92Q) VH]::huIgG1z
QVQLVESGGGVVQPGGSLRLSCAASGFTFSRYGIHWVRQAPGKGLEWVAVIWYEGSNKYYAESVKGRFTISRDNSKNTLYLQMNSLRAEDSAVYYCARRAGIPGTTGYYYGMDVWGQGTTVTVSSASTKGPSVFPLAPSSKSTSGGTAALGCLVKDYFPEPVTVSWNSGALTSGVHTFPAVLQSSGLYSLSSVVTVPSSSLGTQTYICNVNHKPSNTKVDKKVEPKSCDKTHTCPPCPAPELLGGPSVFLFPPKPKDTLMISRTPEVTCVVVDVSHEDPEVKFNWYVDGVEVHNAKTKPREEQYNSTYRVVSVLTVLHQDWLNGKEYKCKVSNKALPAPIEKTISKAKGQPREPQVYTLPPSREEMTKNQVSLTCLVKGFYPSDIAVEWESNGQPENNYKTTPPVLDSDGSFFLYSKLTVDKSRWQQGNVFSCSVMHEALHNHYTQKSLSLSPGK

SEQ ID NO: 778 - protein, 455 aa, artificial; identical to SEQ ID NO: 666
  HC [hu anti-<huCDH19> 23A10.3 VH]::huIgG1z

SEQ ID NO: 779 - protein, 450 aa, artificial; identical to SEQ ID NO: 723
  HC [hu anti-<huCDH19> 25G10.1 VH]::huIgG1z

SEQ ID NO: 780 - protein, 450 aa, artificial
  HC [hu anti-<huCDH19> 25G10.1 (1-469)(D109E,W132Y,W135Y) VH]::huIgG1z
QVQLQESGPGLVKPSETLSLTCTVSGGSISGYYWSWIRQPPGKGLEWIGYIYYIGSTNYNPSLKSRVTMSVDTSKNQFSLKLSSVTAADTAVYYCAREGSSGYYRYFDPWGQGTLVTVSSASTKGPSVFPLAPSSKSTSGGTAALGCLVKDYFPEPVTVSWNSGALTSGVHTFPAVLQSSGLYSLSSVVTVPSSSLGTQTYICNVNHKPSNTKVDKKVEPKSCDKTHTCPPCPAPELLGGPSVFLFPPKPKDTLMISRTPEVTCVVVDVSHEDPEVKFNWYVDGVEVHNAKTKPREEQYNSTYRVVSVLTVLHQDWLNGKEYKCKVSNKALPAPIEKTISKAKGQPREPQVYTLPPSREEMTKNQVSLTCLVKGFYPSDIAVEWESNGQPENNYKTTPPVLDSDGSFFLYSKLTVDKSRWQQGNVFSCSVMHEALHNHYTQKSLSLSPGK

SEQ ID NO: 781 - protein, 450 aa, artificial; identical to SEQ ID NO: 672
  HC [hu anti-<huCDH19> 26D1.1 VH]::huIgG1z

SEQ ID NO: 782 - protein, 450 aa, artificial; identical to SEQ ID NO: 672
  HC [hu anti-<huCDH19> 26D1.1 VH]::huIgG1z

SEQ ID NO: 783 - protein, 450 aa, artificial; identical to SEQ ID NO: 672
  HC [hu anti-<huCDH19> 26D1.1 VH]::huIgG1z

SEQ ID NO: 784 - protein, 450 aa, artificial; identical to SEQ ID NO: 672
  HC [hu anti-<huCDH19> 26D1.1 VH]::huIgG1z

SEQ ID NO: 785 - protein, 450 aa, artificial
  HC [hu anti-<huCDH19> 26D1.1 (1-469)(W133Y) VH]::huIgG1z
QVQLVQSGAEVKKPGASVKVSCKASRYTFTSYYMSWVRQAPGQGLEWMGIIHPSGGDTTYAQKFQGRVTMTGDTSTSTVYMELSSLRSEDTAVYYCARGGIKLYLHFDYWGQGTLVTVSSASTKGPSVFPLAPSSKSTSGGTAALGCLVKDYFPEPVTVSWNSGALTSGVHTFPAVLQSSGLYSLSSVVTVPSSSLGTQTYICNVNHKPSNTKVDKKVEPKSCDKTHTCPPCPAPELLGGPSVFLFPPKPKDTLMISRTPEVTCVVVDVSHEDPEVKFNWYVDGVEVHNAKTKPREEQYNSTYRVVSVLTVLHQDWLNGKEYKCKVSNKALPAPIEKTISKAKGQPREPQVYTLPPSREEMTKNQVSLTCLVKGFYPSDIAVEWESNGQPENNYKTTPPVLDSDGSFFLYSKLTVDKSRWQQGNVFSCSVMHEALHNHYTQKSLSLSPGK

SEQ ID NO: 786 - protein, 450 aa, artificial
  HC [hu anti-<huCDH19> 26D1.1 (1-469)(R27G,G82R) VH]::huIgG1z
QVQLVQSGAEVKKPGASVKVSCKASGYTFTSYYMSWVRQAPGQGLEWMGIIHPSGGDTTYAQKFQGRVTMTRDTSTSTVYMELSSLRSEDTAVYYCARGGIKLWLHFDYWGQGTLVTVSSASTKGPSVFPLAPSSKSTSGGTAALGCLVKDYFPEPVTVSWNSGALTSGVHTFPAVLQSSGLYSLSSVVTVPSSSLGTQTYICNVNHKPSNTKVDKKVEPKSCDKTHTCPPCPAPELLGGPSVFLFPPKPKDTLMISRTPEVTCVVVDVSHEDPEVKFNWYVDGVEVHNAKTKPREEQYNSTYRVVSVLTVLHQDWLNGKEYKCKVSNKALPAPIEKTISKAKGQPREPQVYTLPPSREEMTKNQVSLTCLVKGFYPSDIAVEWESNGQPENNYKTTPPVLDSDGSFFLYSKLTVDKSRWQQGNVFSCSVMHEALHNHYTQKSLSLSPGK

SEQ ID NO: 787 - protein, 450 aa, artificial; identical to SEQ ID NO: 674
  HC [hu anti-<huCDH19> 26F12.1 VH]::huIgG1z

SEQ ID NO: 788 - protein, 450 aa, artificial; identical to SEQ ID NO: 674
  HC [hu anti-<huCDH19> 26F12.1 VH]::huIgG1z

SEQ ID NO: 789 - protein, 450 aa, artificial
  HC [hu anti-<huCDH19> 26F12.1 (1-469)(W133Y) VH]::huIgG1z
QVQLVQSGAEVKKPGASVKVSCKASRYTFTNYYMSWVRQAPGQGLEWMGIINPSGGDSTYAQKFQGRLTMTGDTSTSTVYMELSSLRSEDTAVYYCARGGIQLYLHFDYWGQGTLVTVSSASTKGPSVFPLAPSSKSTSGGTAALGCLVKDYFPEPVTVSWNSGALTSGVHTFPAVLQSSGLYSLSSVVTVPSSSLGTQTYICNVNHKPSNTKVDKKVEPKSCDKTHTCPPCPAPELLGGPSVFLFPPKPKDTLMISRTPEVTCVVVDVSHEDPEVKFNWYVDGVEVHNAKTKPREEQYNSTYRVVSVLTVLHQDWLNGKEYKCKVSNKALPAPIEKTISKAKGQPREPQVYTLPPSREEMTKNQVSLTCLVKGFYPSDIAVEWESNGQPENNYKTTPPVLDSDGSFFLYSKLTVDKSRWQQGNVFSCSVMHEALHNHYTQKSLSLSPGK

SEQ ID NO: 790 - protein, 450 aa, artificial; identical to SEQ ID NO: 789
  HC [hu anti-<huCDH19> 26F12.1 (1-469)(W133Y) VH]::huIgG1z

SEQ ID NO: 791 - protein, 450 aa, artificial; identical to SEQ ID NO: 668
  HC [hu anti-<huCDH19> 25F8.1 VH]::huIgG1z

SEQ ID NO: 792 - protein, 450 aa, artificial; identical to SEQ ID NO: 668
  HC [hu anti-<huCDH19> 25F8.1 VH]::huIgG1z

SEQ ID NO: 793 - protein, 450 aa, artificial
  HC [hu anti-<huCDH19> 25F8.1 (1-469)(F90Y) VH]::huIgG1z
QVQLVQSGAEVKKPGASVKVSCKASGYTFTSYYIHWVRQAPGQGLEWMGIINPSGGSTRYAQKFQGRVTMTRDTSTSTVYMELSSLRSEDTAVYYCARGGIQLWLHFDYWGQGTLVTVSSASTKGPSVFPLAPSSKSTSGGTAALGCLVKDYFPEPVTVSWNSGALTSGVHTFPAVLQSSGLYSLSSVVTVPSSSLGTQTYICNVNHKPSNTKVDKKVEPKSCDKTHTCPPCPAPELLGGPSVFLFPPKPKDTLMISRTPEVTCVVVDVSHEDPEVKFNWYVDGVEVHNAKTKPREEQYNSTYRVVSVLTVLHQDWLNGKEYKCKVSNKALPAPIEKTISKAKGQPREPQVYTLPPSREEMTKNQVSLTCLVKGFYPSDIAVEWESNGQPENNYKTTPPVLDSDGSFFLYSKLTVDKSRWQQGNVFSCSVMHEALHNHYTQKSLSLSPGK

SEQ ID NO: 794 - protein, 450 aa, artificial; identical to SEQ ID NO: 793
  HC [hu anti-<huCDH19> 25F8.1 (1-469)(F90Y) VH]::huIgG1z

SEQ ID NO: 795 - protein, 450 aa, artificial
  HC [hu anti-<huCDH19> 25F8.1 (1-469)(F90Y,W133Y) VH]::huIgG1z
QVQLVQSGAEVKKPGASVKVSCKASGYTFTSYYIHWVRQAPGQGLEWMGIINPSGGSTRYAQKFQGRVTMTRDTSTSTVYMELSSLRSEDTAVYYCARGGIQLYLHFDYWGQGTLVTVSSASTKGPSVFPLAPSSKSTSGGTAALGCLVKDYFPEPVTVSWNSGALTSGVHTFPAVLQSSGLYSLSSVVTVPSSSLGTQTYICNVNHKPSNTKVDKKVEPKSCDKTHTCPPCPAPELLGGPSVFLFPPKPKDTLMISRTPEVTCVVVDVSHEDPEVKFNWYVDGVEVHNAKTKPREEQYNSTYRVVSVLTVLHQDWLNGKEYKCKVSNKALPAPIEKTISKAKGQPREPQVYTLPPSREEMTKNQVSLTCLVKGFYPSDIAVEWESNGQPENNYKTTPPVLDSDGSFFLYSKLTVDKSRWQQGNVFSCSVMHEALHNHYTQKSLSLSPGK

SEQ ID NO: 796 - protein, 450 aa, artificial; identical to SEQ ID NO: 662
  HC [hu anti-<huCDH19> 22D1.1 VH]::huIgG1z

SEQ ID NO: 797 - protein, 450 aa, artificial; identical to SEQ ID NO: 662
  HC [hu anti-<huCDH19> 22D1.1 VH]::huIgG1z

SEQ ID NO: 798 - protein, 450 aa, artificial
  hu anti-<huCDH19> 22D1.1 (1-469)(W133Y) VH]::huIgG1z
QVQLVQSGAEVKKPGASVRVSCKVSGYTFTSYFIHWVRQAPGQGLEWMGIINPISVSTSYAQKFQGRVTMTRDTSTSTVFMELSSLRSEDTAVYYCARGGIQLYLHLDYWGQGTLVTVSSASTKGPSVFPLAPSSKSTSGGTAALGCLVKDYFPEPVTVSWNSGALTSGVHTFPAVLQSSGLYSLSSVVTVPSSSLGTQTYICNVNHKPSNTKVDKKVEPKSCDKTHTCPPCPAPELLGGPSVFLFPPKPKDTLMISRTPEVTCVVVDVSHEDPEVKFNWYVDGVEVHNAKTKPREEQYNSTYRVVSVLTVLHQDWLNGKEYKCKVSNKALPAPIEKTISKAKGQPREPQVYTLPPSREEMTKNQVSLTCLVKGFYPSDIAVEWESNGQPENNYKTTPPVLDSDGSFFLYSKLTVDKSRWQQGNVFSCSVMHEALHNHYTQKSLSLSPGK

SEQ ID NO: 799 - protein, 450 aa, artificial; identical to SEQ ID NO: 798
  HC [hu anti-<huCDH19> 22D1.1 (1-469)(W133Y) VH]::huIgG1z

SEQ ID NO: 800 - protein, 450 aa, artificial
  HC [hu anti-<huCDH19> 22D1.1 (1-469)(F90Y) VH]::huIgG1z
QVQLVQSGAEVKKPGASVRVSCKVSGYTFTSYFIHWVRQAPGQGLEWMGIINPISVSTSYAQKFQGRVTMTRDTSTSTVYMELSSLRSEDTAVYYCARGGIQLWLHLDYWGQGTLVTVSSASTKGPSVFPLAPSSKSTSGGTAALGCLVKDYFPEPVTVSWNSGALTSGVHTFPAVLQSSGLYSLSSVVTVPSSSLGTQTYICNVNHKPSNTKVDKKVEPKSCDKTHTCPPCPAPELLGGPSVFLFPPKPKDTLMISRTPEVTCVVVDVSHEDPEVKFNWYVDGVEVHNAKTKPREEQYNSTYRVVSVLTVLHQDWLNGKEYKCKVSNKALPAPIEKTISKAKGQPREPQVYTLPPSREEMTKNQVSLTCLVKGFYPSDIAVEWESNGQPENNYKTTPPVLDSDGSFFLYSKLTVDKSRWQQGNVFSCSVMHEALHNHYTQKSLSLSPGK

SEQ ID NO: 801 - protein, 446 aa, artificial; identical to SEQ ID NO: 650
  HC [hu anti-<huCDH19> 4F7 VH]::huIgG1z

SEQ ID NO: 802 - protein, 455 aa, artificial; identical to SEQ ID NO: 640
  HC [hu anti-<huCDH19> 2G6 VH]::huIgG1z

SEQ ID NO: 803 - protein, 455 aa, artificial
  HC [hu anti-<huCDH19> 2G6 (1-477)(R17G,K94N) VH]::huIgG1z
QVQLVESGGGVVQPGGSLRLSCAASGFTFSSYGMHWVRQAPGKGLEWVAFIWYDGSNKYYADSVKDRFTISRDNSKNTLYLQMNSLRAEDTAVYYCARRAGIIGTIGYYYGMDVWGQGTTVTVSSASTKGPSVFPLAPSSKSTSGGTAALGCLVKDYFPEPVTVSWNSGALTSGVHTFPAVLQSSGLYSLSSVVTVPSSSLGTQTYICNVNHKPSNTKVDKKVEPKSCDKTHTCPPCPAPELLGGPSVFLFPPKPKDTLMISRTPEVTCVVVDVSHEDPEVKFNWYVDGVEVHNAKTKPREEQYNSTYRVVSVLTVLHQDWLNGKEYKCKVSNKALPAPIEKTISKAKGQPREPQVYTLPPSREEMTKNQVSLTCLVKGFYPSDIAVEWESNGQPENNYKTTPPVLDSDGSFFLYSKLTVDKSRWQQGNVFSCSVMHEALHNHYTQKSLSLSPGK

SEQ ID NO: 804 - protein, 455 aa, artificial
  HC [hu anti-<huCDH19> 2G6 (1-477)(D61E,D72E) VH]::huIgG1z
QVQLVESGGGVVQPGRSLRLSCAASGFTFSSYGMHWVRQAPGKGLEWVAFIWYEGSNKYYAESVKDRFTISRDNSKNTLYLQMKSLRAEDTAVYYCARRAGIIGTIGYYYGMDVWGQGTTVTVSSASTKGPSVFPLAPSSKSTSGGTAALGCLVKDYFPEPVTVSWNSGALTSGVHTFPAVLQSSGLYSLSSVVTVPSSSLGTQTYICNVNHKPSNTKVDKKVEPKSCDKTHTCPPCPAPELLGGPSVFLFPPKPKDTLMISRTPEVTCVVVDVSHEDPEVKFNWYVDGVEVHNAKTKPREEQYNSTYRVVSVLTVLHQDWLNGKEYKCKVSNKALPAPIEKTISKAKGQPREPQVYTLPPSREEMTKNQVSLTCLVKGFYPSDIAVEWESNGQPENNYKTTPPVLDSDGSFFLYSKLTVDKSRWQQGNVFSCSVMHEALHNHYTQKSLSLSPGK

SEQ ID NO: 805 - protein, 455 aa, artificial
  HC [hu anti-<huCDH19> 2G6 (1-477)(R17G) VH]::huIgG1z
QVQLVESGGGVVQPGGSLRLSCAASGFTFSSYGMHWVRQAPGKGLEWVAFIWYDGSNKYYADSVKDRFTISRDNSKNTLYLQMKSLRAEDTAVYYCARRAGIIGTIGYYYGMDVWGQGTTVTVSSASTKGPSVFPLAPSSKSTSGGTAALGCLVKDYFPEPVTVSWNSGALTSGVHTFPAVLQSSGLYSLSSVVTVPSSSLGTQTYICNVNHKPSNTKVDKKVEPKSCDKTHTCPPCPAPELLGGPSVFLFPPKPKDTLMISRTPEVTCVVVDVSHEDPEVKFNWYVDGVEVHNAKTKPREEQYNSTYRVVSVLTVLHQDWLNGKEYKCKVSNKALPAPIEKTISKAKGQPREPQVYTLPPSREEMTKNQVSLTCLVKGFYPSDIAVEWESNGQPENNYKTTPPVLDSDGSFFLYSKLTVDKSRWQQGNVFSCSVMHEALHNHYTQKSLSLSPGK

SEQ ID NO: 806 - protein, 214 aa, artificial; identical to SEQ ID NO: 684
  LC [hu anti-<huCDH19> 4F3 VL]::huKLC

SEQ ID NO: 807 - protein, 217 aa, artificial; identical to SEQ ID NO: 680
  LC [hu anti-<huCDH19> 4A9 VL]::huLLC-C1

SEQ ID NO: 808 - protein, 214 aa, artificial; identical to SEQ ID NO: 682
  LC [hu anti-<huCDH19> 4B10 VL]::huKLC

SEQ ID NO: 809 - protein, 215 aa, artificial; identical to SEQ ID NO: 692
  LC [hu anti-<huCDH19> 17H8.2 VL]::huKLC

SEQ ID NO: 810 - protein, 215 aa, artificial; identical to SEQ ID NO: 690
  LC [hu anti-<huCDH19> 16C1.1 VL]::huKLC

SEQ ID NO: 811 - protein, 215 aa, artificial; identical to SEQ ID NO: 688
  LC [hu anti-<huCDH19> 16A4.1 VL]::huKLC

SEQ ID NO: 812 - protein, 214 aa, artificial; identical to SEQ ID NO: 700
  LC [hu anti-<huCDH19> 22G10.1 VL]::huKLC

SEQ ID NO: 813 - protein, 216 aa, artificial; identical to SEQ ID NO: 696
  LC [hu anti-<huCDH19> 20D3.1 VL]::huLLC-C2

SEQ ID NO: 814 - protein, 216 aa, artificial; identical to SEQ ID NO: 698
  LC [hu anti-<huCDH19> 22D1.1 VL]::huLLC-C2

SEQ ID NO: 815 - protein, 216 aa, artificial; identical to SEQ ID NO: 704
  LC [hu anti-<huCDH19> 25F8.1 VL]::huLLC-C2

SEQ ID NO: 816 - protein, 216 aa, artificial; identical to SEQ ID NO: 710
  LC [hu anti-<huCDH19> 26F12.1 VL]::huLLC-C2

SEQ ID NO: 817 - protein, 216 aa, artificial; identical to SEQ ID NO: 708
  LC [hu anti-<huCDH19> 26D1.1 VL]::huLLC-C2

SEQ ID NO: 818 - protein, 215 aa, artificial; identical to SEQ ID NO: 706
  LC [hu anti-<huCDH19> 25G10.1 VL]::huKLC

SEQ ID NO: 819 - protein, 216 aa, artificial; identical to SEQ ID NO: 694
  LC [hu anti-<huCDH19> 19B5.1 VL]::huLLC-C2

SEQ ID NO: 820 - protein, 214 aa, artificial
  LC [hu anti-<huCDH19> 4A2 (1-236)(N30Q) VL]::huKLC
EIVLTQSPGTLSLSPGERATLSCRASRQISSSYLAWYQQKPGQAPRLLIYGPSSRATGIPDRFSGSGSGTDFTLTISRLEPEDFTVYYCQQYGSSFTFGPGTKVDIKRTVAAPSVFIFPPSDEQLKSGTASVVCLLNNFYPREAKVQWKVDNALQSGNSQESVTEQDSKDSTYSLSSTLTLSKADYEKHKVYACEVTHQGLSSPVTKSFNRGEC

SEQ ID NO: 821 - protein, 214 aa, artificial
  LC [hu anti-<huCDH19> 4A2 (1-236)(N30Q,T102A,P141Q) VL]::huKLC
EIVLTQSPGTLSLSPGERATLSCRASRQISSSYLAWYQQKPGQAPRLLIYGPSSRATGIPDRFSGSGSGTDFTLTISRLEPEDFAVYYCQQYGSSFTFGQGTKVDIKRTVAAPSVFIFPPSDEQLKSGTASVVCLLNNFYPREAKVQWKVDNALQSGNSQESVTEQDSKDSTYSLSSTLTLSKADYEKHKVYACEVTHQGLSSPVTKSFNRGEC

SEQ ID NO: 822 - protein, 214 aa, artificial
  LC [hu anti-<huCDH19> 4A2 (1-236)(N30Q,T102A) VL]::huKLC
EIVLTQSPGTLSLSPGERATLSCRASRQISSSYLAWYQQKPGQAPRLLIYGPSSRATGIPDRFSGSGSGTDFTLTISRLEPEDFAVYYCQQYGSSFTFGPGTKVDIKRTVAAPSVFIFPPSDEQLKSGTASVVCLLNNFYPREAKVQWKVDNALQSGNSQESVTEQDSKDSTYSLSSTLTLSKADYEKHKVYACEVTHQGLSSPVTKSFNRGEC

SEQ ID NO: 823 - protein, 214 aa, artificial; identical to SEQ ID NO: 822
  LC [hu anti-<huCDH19> 4A2 (1-236)(N30Q,T102A) VL]::huKLC

SEQ ID NO: 824 - protein, 214 aa, artificial; identical to SEQ ID NO: 821
  LC [hu anti-<huCDH19> 4A2 (1-236)(N30Q,T102A,P141Q) VL]::huKLC

SEQ ID NO: 825 - protein, 214 aa, artificial; identical to SEQ ID NO: 821
  LC [hu anti-<huCDH19> 4A2 (1-236)(N30Q,T102A,P141Q) VL]::huKLC

SEQ ID NO: 826 - protein, 214 aa, artificial
  LC [hu anti-<huCDH19> 4A2 (1-236)(R29Q,N30S) VL]::huKLC
EIVLTQSPGTLSLSPGERATLSCRASQSISSSYLAWYQQKPGQAPRLLIYGPSSRATGIPDRFSGSGSGTDFTLTISRLEPEDFTVYYCQQYGSSFTFGPGTKVDIKRTVAAPSVFIFPPSDEQLKSGTASVVCLLNNFYPREAKVQWKVDNALQSGNSQESVTEQDSKDSTYSLSSTLTLSKADYEKHKVYACEVTHQGLSSPVTKSFNRGEC

SEQ ID NO: 827 - protein, 214 aa, artificial; identical to SEQ ID NO: 684
  LC [hu anti-<huCDH19> 4F3 VL]::huKLC

SEQ ID NO: 828 - protein, 214 aa, artificial; identical to SEQ ID NO: 684
  LC [hu anti-<huCDH19> 4F3 VL]::huKLC

SEQ ID NO: 829 - protein, 214 aa, artificial; identical to SEQ ID NO: 684
  LC [hu anti-<huCDH19> 4F3 VL]::huKLC

SEQ ID NO: 830 - protein, 214 aa, artificial; identical to SEQ ID NO: 684
  LC [hu anti-<huCDH19> 4F3 VL]::huKLC

SEQ ID NO: 831 - protein, 214 aa, artificial; identical to SEQ ID NO: 684
  LC [hu anti-<huCDH19> 4F3 VL]::huKLC

SEQ ID NO: 832 - protein, 212 aa, artificial
  LC [hu anti-<huCDH19> 2G6 (1-234)(C42S,D110E) VL]::huLLC-C1
SYELTQPPSVSVSPGQTASITCSGDRLGEKYTSWYQQRPGQSPLLVIYQDTKRPSGIPERFSGSNSGNTATLTISGTQAMDEADYYCQAWESSTVVFGGGTKLTVLGQPKANPTVTLFPPSSEELQANKATLVCLISDFYPGAVTVAWKADGSPVKAGVETTKPSKQSNNKYAASSYLSLTPEQWKSHRSYSCQVTHEGSTVEKTVAPTECS

SEQ ID NO: 833 - protein, 215 aa, artificial
  LC [hu anti-<huCDH19> 16C1.1 (1-235)(H105Y) VL]::huKLC
EIVLTQSPGTLSLSPGERATLSCRASQSVSSSYLAWYQQKPGQAPRLLIFGASSRATGIPDRFSGSGSGTDFTLTISGLEPEDFAVYYCQQYGNSPLTFGGGTKVEIKRTVAAPSVFIFPPSDEQLKSGTASVVCLLNNFYPREAKVQWKVDNALQSGNSQESVTEQDSKDSTYSLSSTLTLSKADYEKHKVYACEVTHQGLSSPVTKSFNRGEC

SEQ ID NO: 834 - protein, 215 aa, artificial; identical to SEQ ID NO: 833
  LC [hu anti-<huCDH19> 16C1.1 (1-235)(H105Y) VL]::huKLC

SEQ ID NO: 835 - protein, 215 aa, artificial; identical to SEQ ID NO: 833
  LC [hu anti-<huCDH19> 16C1.1 (1-235)(H105Y) VL]::huKLC

SEQ ID NO: 836 - protein, 215 aa, artificial; identical to SEQ ID NO: 833
  LC [hu anti-<huCDH19> 16C1.1 (1-235)(H105Y) VL]::huKLC

SEQ ID NO: 837 - protein, 215 aa, artificial
  LC [hu anti-<huCDH19> 16C1.1 (1-235)(G95R,H105Y,G141Q) VL]::huKLC
EIVLTQSPGTLSLSPGERATLSCRASQSVSSSYLAWYQQKPGQAPRLLIFGASSRATGIPDRFSGSGSGTDFTLTISRLEPEDFAVYYCQQYGNSPLTFGQGTKVEIKRTVAAPSVFIFPPSDEQLKSGTASVVCLLNNFYPREAKVQWKVDNALQSGNSQESVTEQDSKDSTYSLSSTLTLSKADYEKHKVYACEVTHQGLSSPVTKSFNRGEC

SEQ ID NO: 838 - protein, 215 aa, artificial
  LC [hu anti-<huCDH19> 17H8.2 (1-235)(G149R) VL]::huKLC
DIVLTQSPGTLSLSPGERATLSCRASQSVAGSYLAWYQQKPGQAPRLLISGASSRATGIPDRFSGSGSGTDFTLTISRLEPEDFAVYYCQQYGKSPITFGQGTRLEMKRTVAAPSVFIFPPSDEQLKSGTASVVCLLNNFYPREAKVQWKVDNALQSGNSQESVTEQDSKDSTYSLSSTLTLSKADYEKHKVYACEVTHQGLSSPVTKSFNRGEC

SEQ ID NO: 839 - protein, 215 aa, artificial; identical to SEQ ID NO: 838
  LC [hu anti-<huCDH19> 17H8.2 (1-235)(G149R) VL]::huKLC

SEQ ID NO: 840 - protein, 215 aa, artificial; identical to SEQ ID NO: 838
  LC [hu anti-<huCDH19> 17H8.2 (1-235)(G149R) VL]::huKLC

SEQ ID NO: 841 - protein, 215 aa, artificial
  LC [hu anti-<huCDH19> 17H8.2 (1-235)(S57Y,G149R) VL]::huKLC
DIVLTQSPGTLSLSPGERATLSCRASQSVAGSYLAWYQQKPGQAPRLLIYGASSRATGIPDRFSGSGSGTDFTLTISRLEPEDFAVYYCQQYGKSPITFGQGTRLEMKRTVAAPSVFIFPPSDEQLKSGTASVVCLLNNFYPREAKVQWKVDNALQSGNSQESVTEQDSKDSTYSLSSTLTLSKADYEKHKVYACEVTHQGLSSPVTKSFNRGEC

SEQ ID NO: 842 - protein, 217 aa, artificial
  LC [hu anti-<huCDH19> 4F7 (1-239)(H57Y) VL]::huLLC-C2
QSVLTQPPSVSGAPGQRVTISCTGSSSNIGTGYDVHWYQQLPGTAPKLLIYGNSNRPSGVPDRFSGSKSGTSASLAITGLQAEDEADYYCQSYDSSLSGWVFGGGTRLTVLGQPKANPTVTLFPPSSEELQANKATLVCLISDFYPGAVTVAWKADGSPVKAGVETTKPSKQSNNKYAASSYLSLTPEQWKSHRSYSCQVTHEGSTVEKTVAPTECS

SEQ ID NO: 843 - protein, 217 aa, artificial
  LC [hu anti-<huCDH19> 4F7 (1-239)(H57Y,D110E) VL]::huLLC-C2
QSVLTQPPSVSGAPGQRVTISCTGSSSNIGTGYDVHWYQQLPGTAPKLLIYGNSNRPSGVPDRFSGSKSGTSASLAITGLQAEDEADYYCQSYESSLSGWVFGGGTRLTVLGQPKANPTVTLFPPSSEELQANKATLVCLISDFYPGAVTVAWKADGSPVKAGVETTKPSKQSNNKYAASSYLSLTPEQWKSHRSYSCQVTHEGSTVEKTVAPTECS

SEQ ID NO: 844 - protein, 217 aa, artificial
  LC [hu anti-<huCDH19> 4F7 (1-239)(D110E) VL]::huLLC-C2
QSVLTQPPSVSGAPGQRVTISCTGSSSNIGTGYDVHWYQQLPGTAPKLLIHGNSNRPSGVPDRFSGSKSGTSASLAITGLQAEDEADYYCQSYESSLSGWVFGGGTRLTVLGQPKANPTVTLFPPSSEELQANKATLVCLISDFYPGAVTVAWKADGSPVKAGVETTKPSKQSNNKYAASSYLSLTPEQWKSHRSYSCQVTHEGSTVEKTVAPTECS

SEQ ID NO: 845 - protein, 214 aa, artificial
  LC [hu anti-<huCDH19> 4B10 (1-236)(H45Q,A90T) VL]::huKLC
EIVLTQSPGTLSLSPGERATLSCRASQSVSNTYLAWYQQRPGQAPRLLIYGASSRATGIPDRFSGSGSGTDFTLTISSLEPEDFAVYYCQQYSNSWTFGQGTKVEIKRTVAAPSVFIFPPSDEQLKSGTASVVCLLNNFYPREAKVQWKVDNALQSGNSQESVTEQDSKDSTYSLSSTLTLSKADYEKHKVYACEVTHQGLSSPVTKSFNRGEC

SEQ ID NO: 846 - protein, 214 aa, artificial; identical to SEQ ID NO: 845
  LC [hu anti-<huCDH19> 4B10 (1-236)(H45Q,A90T) VL]::huKLC

SEQ ID NO: 847 - protein, 214 aa, artificial; identical to SEQ ID NO: 845
  LC [hu anti-<huCDH19> 4B10 (1-236)(H45Q,A90T) VL]::huKLC

SEQ ID NO: 848 - protein, 214 aa, artificial; identical to SEQ ID NO: 845
  LC [hu anti-<huCDH19> 4B10 (1-236)(H45Q,A90T) VL]::huKLC

SEQ ID NO: 849 - protein, 217 aa, artificial
  LC [hu anti-<huCDH19> 4A9 (1-239)(F47L) VL]::huLLC-C1
QSVLTQPPSVSGAPGQRVTISCTGSSSNIGTGYAVHWYQQLPGTAPKLLIYGNNNRPSGVPDRFSGSKSGTSASLAITGLQAEDEADYYCQSYDSRLSGWVFGGGTKLTVLGQPKANPTVTLFPPSSEELQANKATLVCLISDFYPGAVTVAWKADGSPVKAGVETTKPSKQSNNKYAASSYLSLTPEQWKSHRSYSCQVTHEGSTVEKTVAPTECS

SEQ ID NO: 850 - protein, 217 aa, artificial; identical to SEQ ID NO: 849
  LC [hu anti-<huCDH19> 4A9 (1-239)(F47L) VL]::huLLC-C1

SEQ ID NO: 851 - protein, 217 aa, artificial
  LC [hu anti-<huCDH19> 4A9 (1-239)(F47L,D110E) VL]::huLLC-C1
QSVLTQPPSVSGAPGQRVTISCTGSSSNIGTGYAVHWYQQLPGTAPKLLIYGNNNRPSGVPDRFSGSKSGTSASLAITGLQAEDEADYYCQSYESRLSGWVFGGGTKLTVLGQPKANPTVTLFPPSSEELQANKATLVCLISDFYPGAVTVAWKADGSPVKAGVETTKPSKQSNNKYAASSYLSLTPEQWKSHRSYSCQVTHEGSTVEKTVAPTECS

SEQ ID NO: 852 - protein, 217 aa, artificial; identical to SEQ ID NO: 851
  LC [hu anti-<huCDH19> 4A9 (1-239)(F47L,D110E) VL]::huLLC-C1

SEQ ID NO: 853 - protein, 216 aa, artificial
  LC [hu anti-<huCDH19> 20D3.1 (1-235)(S102A) VL]::huLLC-C2
QSALTQPPSATGTPGQRVTISCSGSSSNIGSNFVNWYKQLPGTAPKVLIYTNNQRPSGVPDRFSGSKSGTSASLAISGLQSEDEADYYCATWDDSLNGWVFGGGTKLTVLGQPKAAPSVTLFPPSSEELQANKATLVCLISDFYPGAVTVAWKADSSPVKAGVETTTPSKQSNNKYAASSYLSLTPEQWKSHRSYSCQVTHEGSTVEKTVAPTECS

SEQ ID NO: 854 - protein, 216 aa, artificial
  LC [hu anti-<huCDH19> 20D3.1 (1-235)(K45Q,S102A) VL]::huLLC-C2
QSALTQPPSATGTPGQRVTISCSGSSSNIGSNFVNWYQQLPGTAPKVLIYTNNQRPSGVPDRFSGSKSGTSASLAISGLQSEDEADYYCATWDDSLNGWVFGGGTKLTVLGQPKAAPSVTLFPPSSEELQANKATLVCLISDFYPGAVTVAWKADSSPVKAGVETTTPSKQSNNKYAASSYLSLTPEQWKSHRSYSCQVTHEGSTVEKTVAPTECS

SEQ ID NO: 855 - protein, 216 aa, artificial; identical to SEQ ID NO: 854
  LC [hu anti-<huCDH19> 20D3.1 (1-235)(K45Q,S102A) VL]::huLLC-C2

SEQ ID NO: 856 - protein, 216 aa, artificial
  LC [hu anti-<huCDH19> 20D3.1 (1-235)(K45Q,S102A,D111E,N135Q) VL]::huLLC-C2
QSALTQPPSATGTPGQRVTISCSGSSSNIGSNFVNWYQQLPGTAPKVLIYTNNQRPSGVPDRFSGSKSGTSASLAISGLQSEDEADYYCATWDESLQGWVFGGGTKLTVLGQPKAAPSVTLFPPSSEELQANKATLVCLISDFYPGAVTVAWKADSSPVKAGVETTTPSKQSNNKYAASSYLSLTPEQWKSHRSYSCQVTHEGSTVEKTVAPTECS

SEQ ID NO: 857 - protein, 216 aa, artificial
  LC [hu anti-<huCDH19> 20D3.1 (1-235)(W109Y) VL]::huLLC-C2
QSALTQPPSATGTPGQRVTISCSGSSSNIGSNFVNWYKQLPGTAPKVLIYTNNQRPSGVPDRFSGSKSGTSASLAISGLQSEDESDYYCATYDDSLNGWVFGGGTKLTVLGQPKAAPSVTLFPPSSEELQANKATLVCLISDFYPGAVTVAWKADSSPVKAGVETTTPSKQSNNKYAASSYLSLTPEQWKSHRSYSCQVTHEGSTVEKTVAPTECS

SEQ ID NO: 858 - protein, 214 aa, artificial; identical to SEQ ID NO: 700
  LC [hu anti-<huCDH19> 22G10.1 VL]::huKLC

SEQ ID NO: 859 - protein, 214 aa, artificial; identical to SEQ ID NO: 700
  LC [hu anti-<huCDH19> 22G10.1 VL]::huKLC

SEQ ID NO: 860 - protein, 214 aa, artificial
  LC [hu anti-<huCDH19> 22G10.1 (1-234)(Q97E,S98P) VL]::huKLC
EIVMTQSPVTLSLSLGERATLSCRASQSISSNLAWFQQKPGQAPRLLIYGAFTRATGIPARVSGSGSGTEFTLTISSLEPEDFAVYYCQQYNYWPLTFGGGTKVEIKRTVAAPSVFIFPPSDEQLKSGTASVVCLLNNFYPREAKVQWKVDNALQSGNSQESVTEQDSKDSTYSLSSTLTLSKADYEKHKVYACEVTHQGLSSPVTKSFNRGEC

SEQ ID NO: 861 - protein, 214 aa, artificial
  LC [hu anti-<huCDH19> 22G10.1 (1-234)(V78F,Q97E,S98P) VL]::huKLC
EIVMTQSPVTLSLSLGERATLSCRASQSISSNLAWFQQKPGQAPRLLIYGAFTRATGIPARFSGSGSGTEFTLTISSLEPEDFAVYYCQQYNYWPLTFGGGTKVEIKRTVAAPSVFIFPPSDEQLKSGTASVVCLLNNFYPREAKVQWKVDNALQSGNSQESVTEQDSKDSTYSLSSTLTLSKADYEKHKVYACEVTHQGLSSPVTKSFNRGEC

SEQ ID NO: 862 - protein, 214 aa, artificial; identical to SEQ ID NO: 861
  LC [hu anti-<huCDH19> 22G10.1 (1-234)(V78F,Q97E,S98P) VL]::huKLC

SEQ ID NO: 863 - protein, 214 aa, artificial; identical to SEQ ID NO: 700
  LC [hu anti-<huCDH19> 22G10.1 VL]::huKLC

SEQ ID NO: 864 - protein, 215 aa, artificial
  LC [hu anti-<huCDH19> 16A4.1 (1-235)(G141Q) VL]::huKLC
EIVLTQSPGTLSLSPGERATLSCRASQSVSSSYLAWYQQKPGQAPRLLIYGTSSRATGIPDRFSGSGSGTDFTLTISRLEPEDFAVYYCQQYGSSPFTFGQGTKVEIKRTVAAPSVFIFPPSDEQLKSGTASVVCLLNNFYPREAKVQWKVDNALQSGNSQESVTEQDSKDSTYSLSSTLTLSKADYEKHKVYACEVTHQGLSSPVTKSFNRGEC

SEQ ID NO: 865 - protein, 216 aa, artificial
  LC [hu anti-<huCDH19> 19B5.1 (1-235)(K45Q,S102A) VL]::huLLC-C2
QSALTQPPSTTGTPGQRVTISCSGSRSNIGSNFVNWYQQLPGTAPKVLIYTNNQRPSGVPDRFSGSKSGTSASLAISGLQSEDEADYYCATWDDSMNGWVFGGGTKLTVLGQPKAAPSVTLFPPSSEELQANKATLVCLISDFYPGAVTVAWKADSSPVKAGVETTTPSKQSNNKYAASSYLSLTPEQWKSHRSYSCQVTHEGSTVEKTVAPTECS

SEQ ID NO: 866 - protein, 216 aa, artificial; identical to SEQ ID NO: 865
  LC [hu anti-<huCDH19> 19B5.1 (1-235)(K45Q,S102A) VL]::huLLC-C2

SEQ ID NO: 867 - protein, 216 aa, artificial
  LC [hu anti-<huCDH19> 19B5.1 (1-235)(T11V,K45Q,S102A) VL]::huLLC-C2
QSALTQPPSVTGTPGQRVTISCSGSRSNIGSNFVNWYQQLPGTAPKVLIYTNNQRPSGVPDRFSGSKSGTSASLAISGLQSEDEADYYCATWDDSMNGWVFGGGTKLTVLGQPKAAPSVTLFPPSSEELQANKATLVCLISDFYPGAVTVAWKADSSPVKAGVETTTPSKQSNNKYAASSYLSLTPEQWKSHRSYSCQVTHEGSTVEKTVAPTECS

SEQ ID NO: 868 - protein, 216 aa, artificial
  LC [hu anti-<huCDH19> 19B5.1 (1-235)(T11V,K45Q,S102A,D111E,N135Q) VL]::huLLC-C2
QSALTQPPSVTGTPGQRVTISCSGSRSNIGSNFVNWYQQLPGTAPKVLIYTNNQRPSGVPDRFSGSKSGTSASLAISGLQSEDEADYYCATWDESMQGWVFGGGTKLTVLGQPKAAPSVTLFPPSSEELQANKATLVCLISDFYPGAVTVAWKADSSPVKAGVETTTPSKQSNNKYAASSYLSLTPEQWKSHRSYSCQVTHEGSTVEKTVAPTECS

SEQ ID NO: 869 - protein, 216 aa, artificial
  LC [hu anti-<huCDH19> 19B5.1 (1-235)(T11V,K45Q,S102A,W109Y,D111E,N135Q) VL]::huLLC-C2
QSALTQPPSVTGTPGQRVTISCSGSRSNIGSNFVNWYQQLPGTAPKVLIYTNNQRPSGVPDRFSGSKSGTSASLAISGLQSEDEADYYCATYDESMQGWVFGGGTKLTVLGQPKAAPSVTLFPPSSEELQANKATLVCLISDFYPGAVTVAWKADSSPVKAGVETTTPSKQSNNKYAASSYLSLTPEQWKSHRSYSCQVTHEGSTVEKTVAPTECS

SEQ ID NO: 870 - protein, 212 aa, artificial
  LC [hu anti-<huCDH19> 23A10.3 (1-231)(C42S) VL]::huLLC-C2
SYELTQPPSVSVSPGQTASITCSGDRLGEKYVSWYQQKPGQSPILVIYQDNKWPSGIPERFSGSNSGNTATLTISGTQAMDEADYYCQAWDSSTVVFGGGTKLTVLGQPKAAPSVTLFPPSSEELQANKATLVCLISDFYPGAVTVAWKADSSPVKAGVETTTPSKQSNNKYAASSYLSLTPEQWKSHRSYSCQVTHEGSTVEKTVAPTECS

SEQ ID NO: 871 - protein, 212 aa, artificial; identical to SEQ ID NO: 870
  LC [hu anti-<huCDH19> 23A10.3 (1-231)(C42S) VL]::huLLC-C2

SEQ ID NO: 872 - protein, 212 aa, artificial
  LC [hu anti-<huCDH19> 23A10.3 (1-231)(C42S,D110E) VL]::huLLC-C2
SYELTQPPSVSVSPGQTASITCSGDRLGEKYVSWYQQKPGQSPILVIYQDNKWPSGIPERFSGSNSGNTATLTISGTQAMDEADYYCQAWESSTVVFGGGTKLTVLGQPKAAPSVTLFPPSSEELQANKATLVCLISDFYPGAVTVAWKADSSPVKAGVETTTPSKQSNNKYAASSYLSLTPEQWKSHRSYSCQVTHEGSTVEKTVAPTECS

SEQ ID NO: 873 - protein, 212 aa, artificial
  LC [hu anti-<huCDH19> 23A10.3 (1-231)(C42Y) VL]::huLLC-C2
SYELTQPPSVSVSPGQTASITCSGDRLGEKYVYWYQQKPGQSPILVIYQDNKWPSGIPERFSGSNSGNTATLTISGTQAMDEADYYCQAWDSSTVVFGGGTKLTVLGQPKAAPSVTLFPPSSEELQANKATLVCLISDFYPGAVTVAWKADSSPVKAGVETTTPSKQSNNKYAASSYLSLTPEQWKSHRSYSCQVTHEGSTVEKTVAPTECS

SEQ ID NO: 874 - protein, 215 aa, artificial
  LC [hu anti-<huCDH19> 25G10.1 (1-235)(H105Y) VL]::huKLC
EIVLTQSPGTLSLSPGERATLSCRASQSVSSSYLAWYQQKPGQAPRLLIFGASSRATGIPDRFSGSGSGTDFTLTISRLEPEDFAVYYCQQYGNSPLTFGGGTKVEIKRTVAAPSVFIFPPSDEQLKSGTASVVCLLNNFYPREAKVQWKVDNALQSGNSQESVTEQDSKDSTYSLSSTLTLSKADYEKHKVYACEVTHQGLSSPVTKSFNRGEC

SEQ ID NO: 875 - protein, 215 aa, artificial; identical to SEQ ID NO: 874
  LC [hu anti-<huCDH19> 25G10.1 (1-235)(H105Y) VL]::huKLC

SEQ ID NO: 876 - protein, 216 aa, artificial
  LC [hu anti-<huCDH19> 26D1.1 (1-235)(S7P) VL]::huLLC-C2
HSVLTQPPSASGTPGQRVTISCSGSRSNIGSNFVNWYQQLPGTAPKLLIYTNNQRPSGVPDRFSGSKSGTSASLAISGLQSEDEADYYCAVWDDSLNGWVFGGGTKLTVLGQPKAAPSVTLFPPSSEELQANKATLVCLISDFYPGAVTVAWKADSSPVKAGVETTTPSKQSNNKYAASSYLSLTPEQWKSHRSYSCQVTHEGSTVEKTVAPTECS

SEQ ID NO: 877 - protein, 216 aa, artificial
  LC [hu anti-<huCDH19> 26D1.1 (1-235)(H1Q,S7P) VL]::huLLC-C2
QSVLTQPPSASGTPGQRVTISCSGSRSNIGSNFVNWYQQLPGTAPKLLIYTNNQRPSGVPDRFSGSKSGTSASLAISGLQSEDEADYYCAVWDDSLNGWVFGGGTKLTVLGQPKAAPSVTLFPPSSEELQANKATLVCLISDFYPGAVTVAWKADSSPVKAGVETTTPSKQSNNKYAASSYLSLTPEQWKSHRSYSCQVTHEGSTVEKTVAPTECS

SEQ ID NO: 878 - protein, 216 aa, artificial
  LC [hu anti-<huCDH19> 26D1.1 (1-235)(H1Q,S7P,W109Y) VL]::huLLC-C2
QSVLTQPPSASGTPGQRVTISCSGSRSNIGSNFVNWYQQLPGTAPKLLIYTNNQRPSGVPDRFSGSKSGTSASLAISGLQSEDEADYYCAVYDDSLNGWVFGGGTKLTVLGQPKAAPSVTLFPPSSEELQANKATLVCLISDFYPGAVTVAWKADSSPVKAGVETTTPSKQSNNKYAASSYLSLTPEQWKSHRSYSCQVTHEGSTVEKTVAPTECS

SEQ ID NO: 879 - protein, 216 aa, artificial
  LC [hu anti-<huCDH19> 26D1.1 (1-235)(H1Q,S7P,W109Y,D111E,N135Q) VL]::huLLC-C2
QSVLTQPPSASGTPGQRVTISCSGSRSNIGSNFVNWYQQLPGTAPKLLIYTNNQRPSGVPDRFSGSKSGTSASLAISGLQSEDEADYYCAVYDESLQGWVFGGGTKLTVLGQPKAAPSVTLFPPSSEELQANKATLVCLISDFYPGAVTVAWKADSSPVKAGVETTTPSKQSNNKYAASSYLSLTPEQWKSHRSYSCQVTHEGSTVEKTVAPTECS

SEQ ID NO: 880 - protein, 216 aa, artificial; identical to SEQ ID NO: 879
  LC [hu anti-<huCDH19> 26D1.1 (1-235)(H1Q,S7P,W109Y,D111E,N135Q) VL]::huLLC-C2

SEQ ID NO: 881 - protein, 216 aa, artificial; identical to SEQ ID NO: 877
  LC [hu anti-<huCDH19> 26D1.1 (1-235)(H1Q,S7P) VL]::huLLC-C2

SEQ ID NO: 882 - protein, 216 aa, artificial
  LC [hu anti-<huCDH19> 26F12.1 (1-235)(S7P) VL]::huLLC-C2
QSVLTQPPSASGTPGQKVTISCSGSRSNIGSNFVNWYQQLPGTAPKLLIYTNYQRPSGVPDRFSGSKSGTSASLAISGLQSEDEADYYCAVWDDSLNGWVFGGGTKLTVLGQPKAAPSVTLFPPSSEELQANKATLVCLISDFYPGAVTVAWKADSSPVKAGVETTTPSKQSNNKYAASSYLSLTPEQWKSHRSYSCQVTHEGSTVEKTVAPTECS

SEQ ID NO: 883 - protein, 216 aa, artificial
  LC [hu anti-<huCDH19> 26F12.1 (1-235)(S7P,D111E) VL]::huLLC-C2
QSVLTQPPSASGTPGQKVTISCSGSRSNIGSNFVNWYQQLPGTAPKLLIYTNYQRPSGVPDRFSGSKSGTSASLAISGLQSEDEADYYCAVWDESLNGWVFGGGTKLTVLGQPKAAPSVTLFPPSSEELQANKATLVCLISDFYPGAVTVAWKADSSPVKAGVETTTPSKQSNNKYAASSYLSLTPEQWKSHRSYSCQVTHEGSTVEKTVAPTECS

SEQ ID NO: 884 - protein, 216 aa, artificial; identical to SEQ ID NO: 883
  LC [hu anti-<huCDH19> 26F12.1 (1-235)(S7P,D111E) VL]::huLLC-C2

SEQ ID NO: 885 - protein, 216 aa, artificial
  LC [hu anti-<huCDH19> 26F12.1 (1-235)(S7P,W109Y,D111E,N135Q) VL]::huLLC-C2
QSVLTQPPSASGTPGQKVTISCSGSRSNIGSNFVNWYQQLPGTAPKLLIYTNYQRPSGVPDRFSGSKSGTSASLAISGLQSEDEADYYCAVYDESLQGWVFGGGTKLTVLGQPKAAPSVTLFPPSSEELQANKATLVCLISDFYPGAVTVAWKADSSPVKAGVETTTPSKQSNNKYAASSYLSLTPEQWKSHRSYSCQVTHEGSTVEKTVAPTECS

SEQ ID NO: 886 - protein, 216 aa, artificial
  LC [hu anti-<huCDH19> 25F8.1 (1-235)(K45Q) VL]::huLLC-C2
QSALTQPPSATGTPGQRVTISCSGSSSNIGRNFVNWYQQLPGTAPKVLIYTNNQRPSGVPDRFSGSKSGTSASLAISGLQSEDESDYYCAAWDDSLNGWVFGGGTKLTVLGQPKAAPSVTLFPPSSEELQANKATLVCLISDFYPGAVTVAWKADSSPVKAGVETTTPSKQSNNKYAASSYLSLTPEQWKSHRSYSCQVTHEGSTVEKTVAPTECS

SEQ ID NO: 887 - protein, 216 aa, artificial
  LC [hu anti-<huCDH19> 25F8.1 (1-235)(K45Q,S102A) VL]::huLLC-C2
QSALTQPPSATGTPGQRVTISCSGSSSNIGRNFVNWYQQLPGTAPKVLIYTNNQRPSGVPDRFSGSKSGTSASLAISGLQSEDEADYYCAAWDDSLNGWVFGGGTKLTVLGQPKAAPSVTLFPPSSEELQANKATLVCLISDFYPGAVTVAWKADSSPVKAGVETTTPSKQSNNKYAASSYLSLTPEQWKSHRSYSCQVTHEGSTVEKTVAPTECS

SEQ ID NO: 888 - protein, 216 aa, artificial; identical to SEQ ID NO: 887
  LC [hu anti-<huCDH19> 25F8.1 (1-235)(K45Q,S102A) VL]::huLLC-C2

SEQ ID NO: 889 - protein, 216 aa, artificial
  LC [hu anti-<huCDH19> 25F8.1 (1-235)(K45Q,S102A,D111E) VL]::huLLC-C2
QSALTQPPSATGTPGQRVTISCSGSSSNIGRNFVNWYQQLPGTAPKVLIYTNNQRPSGVPDRFSGSKSGTSASLAISGLQSEDEADYYCAAWDESLNGWVFGGGTKLTVLGQPKAAPSVTLFPPSSEELQANKATLVCLISDFYPGAVTVAWKADSSPVKAGVETTTPSKQSNNKYAASSYLSLTPEQWKSHRSYSCQVTHEGSTVEKTVAPTECS

SEQ ID NO: 890 - protein, 216 aa, artificial
  LC [hu anti-<huCDH19> 25F8.1 (1-235)(K45Q,S102A,D111E,N135Q) VL]::huLLC-C2
QSALTQPPSATGTPGQRVTISCSGSSSNIGRNFVNWYQQLPGTAPKVLIYTNNQRPSGVPDRFSGSKSGTSASLAISGLQSEDEADYYCAAWDESLQGWVFGGGTKLTVLGQPKAAPSVTLFPPSSEELQANKATLVCLISDFYPGAVTVAWKADSSPVKAGVETTTPSKQSNNKYAASSYLSLTPEQWKSHRSYSCQVTHEGSTVEKTVAPTECS

SEQ ID NO: 891 - protein, 216 aa, artificial
  LC [hu anti-<huCDH19> 22D1.1 (1-235)(K45Q,S102A) VL]::huLLC-C2
QSALTQPPSATGTPGQRVTISCSGSSSNIGSNFVNWYQQLPGTAPKVLIYTNNQRPSGVPDRFSGSKSGTSASLAISGLQSEDEADYYCATWDDSMNGWVFGGGTKLTVLGQPKAAPSVTLFPPSSEELQANKATLVCLISDFYPGAVTVAWKADSSPVKAGVETTTPSKQSNNKYAASSYLSLTPEQWKSHRSYSCQVTHEGSTVEKTVAPTECS

SEQ ID NO: 892 - protein, 216 aa, artificial
  LC [hu anti-<huCDH19> 22D1.1 (1-235)(K45Q,S102A,D111E,N135Q) VL]::huLLC-C2
QSALTQPPSATGTPGQRVTISCSGSSSNIGSNFVNWYQQLPGTAPKVLIYTNNQRPSGVPDRFSGSKSGTSASLAISGLQSEDEADYYCATWDESMQGWVFGGGTKLTVLGQPKAAPSVTLFPPSSEELQANKATLVCLISDFYPGAVTVAWKADSSPVKAGVETTTPSKQSNNKYAASSYLSLTPEQWKSHRSYSCQVTHEGSTVEKTVAPTECS

SEQ ID NO: 893 - protein, 216 aa, artificial
  LC [hu anti-<huCDH19> 22D1.1 (1-235)(K45Q,S102A,W109Y,D111E,N135Q) VL]::huLLC-C2
QSALTQPPSATGTPGQRVTISCSGSSSNIGSNFVNWYQQLPGTAPKVLIYTNNQRPSGVPDRFSGSKSGTSASLAISGLQSEDEADYYCATYDESMQGWVFGGGTKLTVLGQPKAAPSVTLFPPSSEELQANKATLVCLISDFYPGAVTVAWKADSSPVKAGVETTTPSKQSNNKYAASSYLSLTPEQWKSHRSYSCQVTHEGSTVEKTVAPTECS

SEQ ID NO: 894 - protein, 216 aa, artificial
  LC [hu anti-<huCDH19> 22D1.1 (1-235)(K45Q,S102A,W109Y) VL]::huLLC-C2
QSALTQPPSATGTPGQRVTISCSGSSSNIGSNFVNWYQQLPGTAPKVLIYTNNQRPSGVPDRFSGSKSGTSASLAISGLQSEDEADYYCATYDDSMNGWVFGGGTKLTVLGQPKAAPSVTLFPPSSEELQANKATLVCLISDFYPGAVTVAWKADSSPVKAGVETTTPSKQSNNKYAASSYLSLTPEQWKSHRSYSCQVTHEGSTVEKTVAPTECS

SEQ ID NO: 895 - protein, 216 aa, artificial; identical to SEQ ID NO: 891
  [hu anti-<huCDH19> 22D1.1 (1-235)(K45Q,S102A) VL]::huLLC-C2

SEQ ID NO: 896 - protein, 217 aa, artificial; identical to SEQ ID NO: 686
  LC [hu anti-<huCDH19> 4F7 VL]::huLLC-C1

SEQ ID NO: 897 - protein, 212 aa, artificial
  LC [hu anti-<huCDH19> 2G6 (1-234)(D110E) VL]::huLLC-C1
SYELTQPPSVSVSPGQTASITCSGDRLGEKYTCWYQQRPGQSPLLVIYQDTKRPSGIPERFSGSNSGNTATLTISGTQAMDEADYYCQAWESSTVVFGGGTKLTVLGQPKANPTVTLFPPSSEELQANKATLVCLISDFYPGAVTVAWKADGSPVKAGVETTKPSKQSNNKYAASSYLSLTPEQWKSHRSYSCQVTHEGSTVEKTVAPTECS

SEQ ID NO: 898 - protein, 212 aa, artificial; identical to SEQ ID NO: 832
  LC [hu anti-<huCDH19> 2G6 (1-234)(C42S,D110E) VL]::huLLC-C1

SEQ ID NO: 899 - protein, 212 aa, artificial; identical to SEQ ID NO: 832
  LC [hu anti-<huCDH19> 2G6 (1-234)(C42S,D110E) VL]::huLLC-C1

SEQ ID NO: 900 - protein, 212 aa, artificial; identical to SEQ ID NO: 870
  LC [hu anti-<huCDH19> 23A10.3 (1-231)(C42S) VL]::huLLC-C2

SEQ ID NO: 901 - protein, 17 aa, artificial
  14039, 14303 - CDR-H2
FIWYEGSNKYYAESVKD

SEQ ID NO: 902 - protein, 10 aa, artificial
  14027 - CDR-H3
EGSSGWYFQY

SEQ ID NO: 903 - protein, 10 aa, artificial
  CDR-H3
EGSSGYYFQY

SEQ ID NO: 904 - protein, 8 aa, artificial
  14059 - CDR-H3
NYAFHFDF

SEQ ID NO: 905 - protein, 17 aa, artificial
  CDR-H2
VISYEGTNEYYAESVKG

SEQ ID NO: 906 - protein, 10 aa, artificial
  CDR-H3
ERYFDYSFDY

SEQ ID NO: 907 - protein, 17 aa, artificial
  CDR-H2
VIWYEGSNKYYAESVRG

SEQ ID NO: 908 - protein, 10 aa, artificial
  CDR-H3
ETGEGYYFDL

SEQ ID NO: 909 - protein, 8 aa, artificial
  CDR-H3
NYAFHFDY

SEQ ID NO: 910 - protein, 14 aa, artificial
  CDR-H3
ESRYRSGWYDAFDI

SEQ ID NO: 911 - protein, 14 aa, artificial
  CDR-H3
ESRYRSGYYDAFDI

SEQ ID NO: 912 - protein, 12 aa, artificial
  CDR-H3
EGSSGWYRWFDP

SEQ ID NO: 913 - protein, 12 aa, artificial
  CDR-H3
DGSSGYYRYFDP

SEQ ID NO: 914 - protein, 17 aa, artificial
  CDR-H2
TISGGGANTYYAESVKG

SEQ ID NO: 915 - protein, 11 aa, artificial
  CDR-H3
GGIQLYLHFDY

SEQ ID NO: 916 - protein, 11 aa, artificial
  CDR-H3
GGIQLYLHLDY

SEQ ID NO: 917 - protein, 11 aa, artificial
  CDR-H3
GGIQLYLHFDY

SEQ ID NO: 918 - protein, 11 aa, artificial
  CDR-H3
GGIQLYLHFDY

SEQ ID NO: 919 - protein, 11 aa, artificial
  CDR-H3
GGIKLYLHFDY

SEQ ID NO: 920 - protein, 12 aa, artificial
  CDR-H3
EGSSGYYRYFDP

SEQ ID NO: 921 - protein, 17 aa, artificial
  CDR-H2
VIWYEGSNKYYAESVKG

SEQ ID NO: 922 - protein, 11 aa, artificial
  CDR-L1
SGDRLGEKYTS

SEQ ID NO: 923 - protein, 9 aa, artificial
  CDR-L3
QAWESSTVV

SEQ ID NO: 924 - protein, 12 aa, artificial
  CDR-L1
RASRQISSSYLA

SEQ ID NO: 925 - protein, 12 aa, artificial
  CDR-L1
RASQSISSSYLA

SEQ ID NO: 926 - protein, 11 aa, artificial
  CDR-L3
QSYESRLSGWV

SEQ ID NO: 927 - protein, 11 aa, artificial
  CDR-L3
QSYESSLSGWV

SEQ ID NO: 928 - protein, 11 aa, artificial
  CDR-L3
ATWDESLQGWV

SEQ ID NO: 929 - protein, 11 aa, artificial
  CDR-L3
ATYDDSLNGWV

SEQ ID NO: 930 - protein, 11 aa, artificial
  CDR-L3
ATWDESMQGWV

SEQ ID NO: 931 - protein, 11 aa, artificial
  CDR-L3
ATYDESMQGWV

SEQ ID NO: 932 - protein, 11 aa, artificial
  CDR-L3
ATYDDSMNGWV

SEQ ID NO: 933 - protein, 11 aa, artificial
  CDR-L3
AAWDESLNGWV

SEQ ID NO: 934 - protein, 11 aa, artificial
  CDR-L3
AAWDESLQGWV

SEQ ID NO: 935 - protein, 11 aa, artificial
  CDR-L3
AVWDESLNGWV

SEQ ID NO: 936 - protein, 11 aa, artificial
  CDR-L3
AVYDESLQGWV

SEQ ID NO: 937 - protein, 11 aa, artificial
  CDR-L3
AVYDDSLNGWV

SEQ ID NO: 938 - protein, 11 aa, artificial
  CDR-L3
AVYDESLQGWV

SEQ ID NO: 939 - protein, 11 aa, artificial
  CDR-L1
SGDRLGEKYVS

SEQ ID NO: 940 - protein, 9 aa, artificial
  CDR-L3
QAWESSTVV

SEQ ID NO: 941 - protein, 11 aa, artificial
  CDR-L1
SGDRLGEKYVY

SEQ ID NO: 942 - protein, 11 aa, artificial
  CDR-L3
ATWDESMQGWV

SEQ ID NO: 943 - protein, 11 aa, artificial
  CDR-L3
ATYDESMQGWV

SEQ ID NO: 944 - protein, 772 aa, human
MNCYLLLRFMLGIPLLWPCLGATENSQTKKVKQPVRSHLRVKRGWVWNQFFVPEEMNTTSHHIGQLRSDLDNGNNSFQYKLLGAGAGSTFIIDERTGDIYAIQKLDREERSLYILRAQVIDIATGRAVEPESEFVIKVSDINDNEPKFLDEPYEAIVPEMSPEGTLVIQVTASDADDPSSGNNARLLYSLLQGQPYFSVEPTTGVIRISSKMDRELQDEYWVIIQAKDMIGQPGALSGTTSVLIKLSDVNDNKPIFKESLYRLTVSESAPTGTSIGTIMAYDNDIGENAEMDYSIEEDDSQTFDIITNHETQEGIVILKKKVDFEHQNHYGIRAKVKNHHVPEQLMKYHTEASTTFIKIQVEDVDEPPLFLLPYYVFEVFEETPQGSFVGVVSATDPDNRKSPIRYSITRSKVFNINDNGTITTSNSLDREISAWYNLSITATEKYNIEQISSIPLYVQVLNINDHAPEFSQYYETYVCENAGSGQVIQTISAVDRDESIEEHHFYFNLSVEDTNNSSFTIIDNQDNTAVILTNRTGFNLQEEPVFYISILIADNGIPSLTSTNTLTIHVCDCGDSGSTQTCQYQELVLSMGFKTEVIIAILICIMIIFGFIFLTLGLKQRRKQILFPEKSEDFRENIFQYDDEGGGEEDTEAFDIAELRSSTIMRERKTRKTTSAEIRSLYRQSLQVGPDSAIFRKFILEKLEEANTDPCAPPFDSLQTYAFEGTGSLAGSLSSLESAVSDQDESYDYLNELGPRFKRLACMFGSAVQSNN

SEQ ID NO: 945 - DNA, 2319 bp, human
atgaactgttatttactgctgcgttttatgttgggaattcctctcctatggccttgtcttggagcaacagaaaactctcaaacaaagaaagtcaagcagccagtgcgatctcatttgagagtgaagcgtggctgggtgtggaaccaattttttgtaccagaggaaatgaatacgactagtcatcacatcggccagctaagatctgatttagacaatggaaacaattctttccagtacaagcttttgggagctggagctggaagtacttttatcattgatgaaagaacaggtgacatatatgccatacagaagcttgatagagaggagcgatccctctacatcttaagagcccaggtaatagacatcgctactggaagggctgtggaacctgagtctgagtttgtcatcaaagtttcggatatcaatgacaatgaaccaaaattcctagatgaaccttatgaggccattgtaccagagatgtctccagaaggaacattagttatccaggtgacagcaagtgatgctgacgatccctcaagtggtaataatgctcgtctcctctacagcttacttcaaggccagccatatttttctgttgaaccaacaacaggagtcataagaatatcttctaaaatggatagagaactgcaagatgagtattgggtaatcattcaagccaaggacatgattggtcagccaggagcgttgtctggaacaacaagtgtattaattaaactttcagatgttaatgacaataagcctatatttaaagaaagtttataccgcttgactgtctctgaatctgcacccactgggacttctataggaacaatcatggcatatgataatgacataggagagaatgcagaaatggattacagcattgaagaggatgattcgcaaacatttgacattattactaatcatgaaactcaagaaggaatagttatattaaaaaagaaagtggattttgagcaccagaaccactacggtattagagcaaaagttaaaaaccatcatgttcctgagcagctcatgaagtaccacactgaggcttccaccactttcattaagatccaggtggaagatgttgatgagcctcctcttttcctccttccatattatgtatttgaagtttttgaagaaaccccacagggatcatttgtaggcgtggtgtctgccacagacccagacaataggaaatctcctatcaggtattctattactaggagcaaagtgttcaatatcaatgataatggtacaatcactacaagtaactcactggatcgtgaaatcagtgcttggtacaacctaagtattacagccacagaaaaatacaatatagaacagatctcttcgatcccactgtatgtgcaagttcttaacatcaatgatcatgctcctgagttctctcaatactatgagacttatgtttgtgaaaatgcaggctctggtcaggtaattcagactatcagtgcagtggatagagatgaatccatagaagagcaccatttttactttaatctatctgtagaagacactaacaattcaagttttacaatcatagataatcaagataacacagctgtcattttgactaatagaactggttttaaccttcaagaagaacctgtcttctacatctccatcttaattgccgacaatggaatcccgtcacttacaagtacaaacacccttaccatccatgtctgtgactgtggtgacagtgggagcacacagacctgccagtaccaggagcttgtgctttccatgggattcaagacagaagtcatcattgctattctcatttgcattatgatcatatttgggtttatttttttgactttgggtttaaaacaacggagaaaacagattctatttcctgagaaaagtgaagatttcagagagaatatattccaatatgatgatgaagggggtggagaagaagatacagaggcctttgatatagcagagctgaggagtagtaccataatgcgggaacgcaagactcggaaaaccacaagcgctgagatcaggagcctatacaggcagtctttgcaagttggccccgacagtgccatattcaggaaattcattctggaaaagctcgaagaagctaatactgatccgtgtgcccctccttttgattccctccagacctacgcttttgagggaacagggtcattagctggatccctgagctccttagaatcagcagtctctgatcaggatgaaagctatgattaccttaatgagttgggacctcgctttaaaagattagcatgcatgtttggttctgcagtgcagtcaaataattag

SEQ ID NO: 946 - protein, 772 aa, cynomolgus
MNCYLLLPFMLGIPLLWPCLGATENSQTKKVQQPVGSHLRVKRGWVWNQFFVPEEMNTTSHHVGRLRSDLDNGNNSFQYKLLGAGAGSTFIIDERTGDIYAIEKLDREERSLYILRAQVIDITTGRAVEPESEFVIKVSDINDNEPKFLDEPYEAIVPEMSPEGTLVIQVTASDADDPSSGNNARLLYSLLQGQPYFSVEPTTGVIRISSKMDRELQDEYWVIIQAKDMIGQPGALSGTTSVLIKLSDVNDNKPIFKESLYRLTVSESAPTGTSIGTIMAYDNDIGENAEMDYSIEEDDSQTFDIITNHETQEGIVILKKKVNFEHQNHYGIRAKVKNHHVDEQLMKYHTEASTTFIKIQVEDVDEPPLFLLPYYIFEIFEETPQGSFVGVVSATDPDNRKSPIRYSITRSKVFNIDDNGTITTTNSLDREISAWYNLSITATEKYNIEQISSIPVYVQVLNINDHAPEFSQYYESYVCENAGSGQVIQTISAVDRDESIEEHHFYFNLSVEDTNSSSFTIIDNQDNTAVILTNRTGFNLQEEPIFYISILIADNGIPSLTSTNTLTIHVCDCDDSGSTQTCQYQELMLSMGFKTEVIIAILICIMVIFGFIFLTLGLKQRRKQILFPEKSEDFRENIFRYDDEGGGEEDTEAFDVAALRSSTIMRERKTRKTTSAEIRSLYRQSLQVGPDSAIFRKFILEKLEEADTDPCAPPFDSLQTYAFEGTGSLAGSLSSLESAVSDQDESYDYLNELGPRFKRLACMFGSAVQSNN

SEQ ID NO: 947 - DNA, 2319 bp, cynomolgus
atgaattgttatttactgctgccttttatgttgggaattcctctcctatggccttgtcttggagcaacagaaaactctcaaacaaagaaagtccagcagccagtaggatctcatctgagagtgaagcgtggctgggtgtggaaccaattttttgtaccagaggaaatgaatacgactagtcatcacgttggccggctaagatctgatttagacaatggaaacaattctttccagtacaagcttttgggagctggagctggaagtacttttatcattgatgaaagaacaggtgacatatatgccatagagaagcttgatagagaggagcgatccctctacatcttaagagcccaggtaatagacatcactactggaagggctgtggaacctgagtctgagtttgtcatcaaagtttcggatatcaatgacaatgaaccaaaattcctagatgaaccttatgaggccattgtaccagagatgtctccagaaggaacattagtcatccaggtgacagcaagtgatgctgatgacccttcaagtggtaataatgctcgtctcctctacagcttattacaaggccagccatatttttctgttgaaccaacaacaggagtcataagaatatcttctaaaatggatagagaactgcaagatgagtattgggtaatcattcaagccaaggacatgattggtcagccaggagcgttgtctggaacaacgagtgtattaattaaactttcagatgttaatgacaataagcctatatttaaagaaagtttataccgcctgacggtctctgaatctgcacccactgggacttctataggaacaatcatggcatatgataatgacataggagagaatgcagaaatggattacagcattgaagaggatgattcacagacatttgacattattactaatcatgaaactcaagaaggaatagttatattaaaaaagaaagtgaattttgagcaccagaaccactatggtattagagcaaaagttaaaaaccatcatgttgatgagcagctcatgaaataccacactgaagcttccaccactttcattaagatccaggtggaagatgttgatgagcctcctcttttcctccttccgtattacatatttgaaatttttgaagaaaccccacaaggatcatttgtaggcgtggtgtctgccacagacccagacaataggaaatctcctatcaggtattctattactaggagcaaagtgttcaatatcgatgataatggtacaatcactacaactaactcactggatcgggaaatcagtgcttggtacaacctaagtattacagccacagaaaaatacaatatagagcagatctcttcgatcccagtgtatgtgcaagttcttaatatcaatgatcatgctcctgagttctctcaatactatgagagttatgtttgtgaaaatgcaggctctggtcaggtaattcagactatcagtgcagtggatagagatgaatccatagaagagcaccatttttactttaatctatctgtagaagacactaactcttcaagttttacaatcatagacaatcaagataacacagctgtcattttgactaatagaactggttttaaccttcaagaagagcccatcttctacatctccatcttaattgccgacaatggaatcccgtcacttacaagtacaaacacccttaccatccatgtctgtgactgtgatgacagtgggagcacacagacctgccagtaccaggagcttatgctttccatgggattcaagacagaagtcatcattgctattctcatttgcattatggtaatatttgggtttatttttttgactttgggtttaaaacaacggagaaaacagattctatttcctgagaaaagtgaagatttcagagagaatatattccgatatgatgacgaagggggtggagaagaagatacagaggcctttgacgtagcagcgctgaggagtagcaccataatgcgggaacgcaagactcggaaaaccaccagcgctgagatcaggagcctatacaggcagtctttgcaagttggccccgacagtgccatattcaggaagttcatcctggaaaagctcgaagaagctgatactgatccgtgtgcccctccttttgattccctccagacctacgcttttgagggaacagggtcattagctggatccctgagctccttagaatcagctgtctctgatcaggatgaaagctatgattaccttaacgagttgggacctcgctttaaaagattagcatgcatgtttggttctgcagtgcagtcaaataattag

SEQ ID NO: 948 - protein, 596 aa, human
MNCYLLLRFMLGIPLLWPCLGATENSQTKKVKQPVRSHLRVKRGWVWNQFFVPEEMNTTSHHIGQLRSDLDNGNNSFQYKLLGAGAGSTFIIDERTGDIYAIQKLDREERSLYILRAQVIDIATGRAVEPESEFVIKVSDINDNEPKFLDEPYEAIVPEMSPEGTLVIQVTASDADDPSSGNNARLLYSLLQGQPYFSVEPTTGVIRISSKMDRELQDEYWVIIQAKDMIGQPGALSGTTSVLIKLSDVNDNKPIFKESLYRLTVSESAPTGTSIGTIMAYDNDIGENAEMDYSIEEDDSQTFDIITNHETQEGIVILKKKVDFEHQNHYGIRAKVKNHHVPEQLMKYHTEASTTFIKIQVEDVDEPPLFLLPYYVFEVFEETPQGSFVGVVSATDPDNRKSPIRYSITRSKVFNINDNGTITTSNSLDREISAWYNLSITATEKYNIEQISSIPLYVQVLNINDHAPEFSQYYETYVCENAGSGQVIQTISAVDRDESIEEHHFYFNLSVEDTNNSSFTIIDNQDNTAVILTNRTGFNLQEEPVFYISILIADNGIPSLTSTNTLTIHVCDCGDSGSTQTCQYQELVLSMGFKTE

SEQ ID NO: 949 - DNA, 1788 bp, human
atgaactgttatttactgctgcgttttatgttgggaattcctctcctatggccttgtcttggagcaacagaaaactctcaaacaaagaaagtcaagcagccagtgcgatctcatttgagagtgaagcgtggctgggtgtggaaccaattttttgtaccagaggaaatgaatacgactagtcatcacatcggccagctaagatctgatttagacaatggaaacaattctttccagtacaagcttttgggagctggagctggaagtacttttatcattgatgaaagaacaggtgacatatatgccatacagaagcttgatagagaggagcgatccctctacatcttaagagcccaggtaatagacatcgctactggaagggctgtggaacctgagtctgagtttgtcatcaaagtttcggatatcaatgacaatgaaccaaaattcctagatgaaccttatgaggccattgtaccagagatgtctccagaaggaacattagttatccaggtgacagcaagtgatgctgacgatccctcaagtggtaataatgctcgtctcctctacagcttacttcaaggccagccatatttttctgttgaaccaacaacaggagtcataagaatatcttctaaaatggatagagaactgcaagatgagtattgggtaatcattcaagccaaggacatgattggtcagccaggagcgttgtctggaacaacaagtgtattaattaaactttcagatgttaatgacaataagcctatatttaaagaaagtttataccgcttgactgtctctgaatctgcacccactgggacttctataggaacaatcatggcatatgataatgacataggagagaatgcagaaatggattacagcattgaagaggatgattcgcaaacatttgacattattactaatcatgaaactcaagaaggaatagttatattaaaaaagaaagtggattttgagcaccagaaccactacggtattagagcaaaagttaaaaaccatcatgttcctgagcagctcatgaagtaccacactgaggcttccaccactttcattaagatccaggtggaagatgttgatgagcctcctcttttcctccttccatattatgtatttgaagtttttgaagaaaccccacagggatcatttgtaggcgtggtgtctgccacagacccagacaataggaaatctcctatcaggtattctattactaggagcaaagtgttcaatatcaatgataatggtacaatcactacaagtaactcactggatcgtgaaatcagtgcttggtacaacctaagtattacagccacagaaaaatacaatatagaacagatctcttcgatcccactgtatgtgcaagttcttaacatcaatgatcatgctcctgagttctctcaatactatgagacttatgtttgtgaaaatgcaggctctggtcaggtaattcagactatcagtgcagtggatagagatgaatccatagaagagcaccatttttactttaatctatctgtagaagacactaacaattcaagttttacaatcatagataatcaagataacacagctgtcattttgactaatagaactggttttaaccttcaagaagaacctgtcttctacatctccatcttaattgccgacaatggaatcccgtcacttacaagtacaaacacccttaccatccatgtctgtgactgtggtgacagtgggagcacacagacctgccagtaccaggagcttgtgctttccatgggattcaagacagaa

SEQ ID NO: 950 - protein, 624 aa, human
MNCYLLLRFMLGIPLLWPCLGATENSQTKKVKQPVRSHLRVKRGWVWNQFFVPEEMNTTSHHIGQLRSDLDNGNNSFQYKLLGAGAGSTFIIDERTGDIYAIQKLDREERSLYILRAQVIDIATGRAVEPESEFVIKVSDINDNEPKFLDEPYEAIVPEMSPEGTLVIQVTASDADDPSSGNNARLLYSLLQGQPYFSVEPTTGVIRISSKMDRELQDEYWVIIQAKDMIGQPGALSGTTSVLIKLSDVNDNKPIFKESLYRLTVSESAPTGTSIGTIMAYDNDIGENAEMDYSIEEDDSQTFDIITNHETQEGIVILKKKVDFEHQNHYGIRAKVKNHHVPEQLMKYHTEASTTFIKIQVEDVDEPPLFLLPYYVFEVFEETPQGSFVGVVSATDPDNRKSPIRYSITRSKVFNINDNGTITTSNSLDREISAWYNLSITATEKYNIEQISSIPLYVQVLNINDHAPEFSQYYETYVCENAGSGQVIQTISAVDRDESIEEHHFYFNLSVEDTNNSSFTIIDNQDNTAVILTNRTGFNLQEEPVFYISILIADNGIPSLTSTNTLTIHVCDCGDSGSTQTCQYQELVLSMGFKTEVIIAILICIMIIFGFIFLTLGLKQRRKQ

SEQ ID NO: 951 - DNA, 1872 bp, human
atgaactgttatttactgctgcgttttatgttgggaattcctctcctatggccttgtcttggagcaacagaaaactctcaaacaaagaaagtcaagcagccagtgcgatctcatttgagagtgaagcgtggctgggtgtggaaccaattttttgtaccagaggaaatgaatacgactagtcatcacatcggccagctaagatctgatttagacaatggaaacaattctttccagtacaagcttttgggagctggagctggaagtacttttatcattgatgaaagaacaggtgacatatatgccatacagaagcttgatagagaggagcgatccctctacatcttaagagcccaggtaatagacatcgctactggaagggctgtggaacctgagtctgagtttgtcatcaaagtttcggatatcaatgacaatgaaccaaaattcctagatgaaccttatgaggccattgtaccagagatgtctccagaaggaacattagttatccaggtgacagcaagtgatgctgacgatccctcaagtggtaataatgctcgtctcctctacagcttacttcaaggccagccatatttttctgttgaaccaacaacaggagtcataagaatatcttctaaaatggatagagaactgcaagatgagtattgggtaatcattcaagccaaggacatgattggtcagccaggagcgttgtctggaacaacaagtgtattaattaaactttcagatgttaatgacaataagcctatatttaaagaaagtttataccgcttgactgtctctgaatctgcacccactgggacttctataggaacaatcatggcatatgataatgacataggagagaatgcagaaatggattacagcattgaagaggatgattcgcaaacatttgacattattactaatcatgaaactcaagaaggaatagttatattaaaaaagaaagtggattttgagcaccagaaccactacggtattagagcaaaagttaaaaaccatcatgttcctgagcagctcatgaagtaccacactgaggcttccaccactttcattaagatccaggtggaagatgttgatgagcctcctcttttcctccttccatattatgtatttgaagtttttgaagaaaccccacagggatcatttgtaggcgtggtgtctgccacagacccagacaataggaaatctcctatcaggtattctattactaggagcaaagtgttcaatatcaatgataatggtacaatcactacaagtaactcactggatcgtgaaatcagtgcttggtacaacctaagtattacagccacagaaaaatacaatatagaacagatctcttcgatcccactgtatgtgcaagttcttaacatcaatgatcatgctcctgagttctctcaatactatgagacttatgtttgtgaaaatgcaggctctggtcaggtaattcagactatcagtgcagtggatagagatgaatccatagaagagcaccatttttactttaatctatctgtagaagacactaacaattcaagttttacaatcatagataatcaagataacacagctgtcattttgactaatagaactggttttaaccttcaagaagaacctgtcttctacatctccatcttaattgccgacaatggaatcccgtcacttacaagtacaaacacccttaccatccatgtctgtgactgtggtgacagtgggagcacacagacctgccagtaccaggagcttgtgctttccatgggattcaagacagaagtcatcattgctattctcatttgcattatgatcatatttgggtttatttttttgactttgggtttaaaacaacggagaaaacag

SEQ ID NO: 952 - protein, 729 aa, artificial
  huCDH19 (44-141) muCDH19 (140-770)
GWVWNQFFVPEEMNTTSHHIGQLRSDLDNGNNSFQYKLLGAGAGSTFIIDERTGDIYAIQKLDREERSLYILRAQVIDIATGRAVEPESEFVIKVSDINDNEPRFLDEPYEAIVPEMSPEGTFVIKVTANDADDPSTGYHARILYNLERGQPYFSVEPTTGVIRISSKMDRELQDTYCVIIQAKDMLGQPGALSGTTTVSIKLSDINDNKPIFKESFYRFTISESAPIGTSIGKIMAYDDDIGENAEMEYSIEDDDSKIFDIIIDNDTQEGIVILKKKVDFEQQSYYGIRAKVKNCHVDEELAPAHVNASTTYIKVQVEDEDEPPVFLLPYYILEIPEGKPYGTIVGTVSATDPDRRQSPMRYYLTGSKMFDINDNGTIITTNMLDREVSAWYNLTVTATETYNVQQISSAHVYVQVFNINDNAPEFSQFYETYVCENAESGEIVQIISAIDRDESIEDHHFYFNHSLEDTNNSSFMLTDNQDNTAVILSNRTGFNLKEEPVFYMIILIADNGIPSLTSTNTLTIQVCDCGDSRNTETCANKGLLFIMGFRTEAIIAIMICVMVIFGFFFLILALKQRRKETLFPEKTEDFRENIFCYDDEGGGEEDSEAFDIVELRQSTVMRERKPQRSKSAEIRSLYRQSLQVGPDSAIFRKFILEKLEEANTDPCAPPFDSLQTFAYEGTGSSAGSLSSLASRDTDQEDDFDYLNDLGPRFKRLASMFGSAVQPNN

SEQ ID NO: 953 - DNA, 2190 bp, artificial
  huCDH19 (44-141) muCDH19 (140-770)
ggctgggtgtggaaccaattttttgtaccagaggaaatgaatacgactagtcatcacatcggccagctaagatctgatttagacaatggaaacaattctttccagtacaagcttttgggagctggagctggaagtacttttatcattgatgaaagaacaggtgacatatatgccatacagaagcttgatagagaggagcgatccctctacatcttaagagcccaggtaatagacatcgctactggaagggctgtggaacctgagtctgagtttgtcatcaaagtttcggatatcaatgacaatgaacccagattcctagatgaaccatatgaggccattgtacctgagatgtctccagaaggaacatttgtcatcaaggtgacagccaatgacgcagatgatccttcaactggctatcatgctcgcatcctatacaacttagaacgaggtcaaccatacttttctgttgagccaacaacaggagtcataaggatatcttctaagatggatagagagttgcaagatacatactgtgtaattattcaagccaaggacatgctcggtcagcctggagccttgtctggaacaacaaccgtatcaattaagctgtcagatattaatgacaacaagccaatattcaaagaaagtttctaccgcttcactatatctgaatctgcacccattggaacatcaatagggaaaattatggcatatgatgatgacataggggagaatgcagagatggagtacagcattgaagatgatgattcaaaaatatttgacataatcattgacaatgacacccaagaagggatagttatacttaaaaagaaagttgattttgagcagcagagctattatggcattagagctaaggttaaaaactgccatgtggatgaagagcttgcacctgcccatgttaacgcttccacaacctacattaaagttcaagtagaagatgaagatgaacctcctgttttcctcttaccatattacatacttgaaattcctgaaggaaaaccatatggaacaattgtggggacggtttctgccacagacccagatcgaagacaatctcctatgagatattatctcactggaagcaaaatgtttgatatcaatgacaatggaacaataatcaccactaacatgcttgacagagaggtcagtgcttggtacaacttgactgtcacagctactgaaacatacaatgtacaacagatctcttcagcccatgtttatgtacaagtctttaacattaacgacaatgctccagagttctctcaattctatgagacttatgtttgtgaaaatgctgaatctggtgagatagttcagatcatcagtgcaattgatagagatgagtccatagaagatcaccatttttactttaatcactctctggaagacacaaacaactcaagttttatgctaacagacaatcaagataacacagctgtaattctgagtaatagaactggtttcaatcttaaagaagagcctgtcttctacatgatcatcttgattgctgataacgggatcccatctctcacaagcacaaacactctcactatccaagtctgtgactgtggagacagtagaaacacagaaacttgtgctaacaagggacttctctttatcatgggattcagaacagaggcaataattgccatcatgatatgtgttatggtaatatttgggtttttctttttgattcttgctctgaaacagcgaagaaaggagactctatttccagagaagactgaagactttagggagaatatattttgctatgatgatgaaggcggcggggaagaagactcggaagcctttgacatcgtagagctgagacaaagtacagtaatgagagaaagaaagcctcagagaagcaagagtgcggagatcaggagcttgtacaggcagtccctgcaggtgggcccagacagtgccatatttcgaaaatttatcctagagaagcttgaagaagccaacacagacccatgtgctcccccctttgattcactacagacgtttgcctatgagggaacagggtcatcagctggctctctgagctccttggcatccagagacactgatcaggaggatgacttcgactaccttaatgacctgggacctcgttttaaaagattagcaagcatgtttggctctgcagtacaacccaacaattag

SEQ ID NO: 954 - protein, 729 aa, artificial
  huCDH19 (44-249) muCDH19 (248-770)
GWVWNQFFVPEEMNTTSHHIGQLRSDLDNGNNSFQYKLLGAGAGSTFIIDERTGDIYAIQKLDREERSLYILRAQVIDIATGRAVEPESEFVIKVSDINDNEPKFLDEPYEAIVPEMSPEGTLVIQVTASDADDPSSGNNARLLYSLLQGQPYFSVEPTTGVIRISSKMDRELQDEYWVIIQAKDMIGQPGALSGTTSVLIKLSDVNDNKPIFKESFYRFTISESAPIGTSIGKIMAYDDDIGENAEMEYSIEDDDSKIFDIIIDNDTQEGIVILKKKVDFEQQSYYGIRAKVKNCHVDEELAPAHVNASTTYIKVQVEDEDEPPVFLLPYYILEIPEGKPYGTIVGTVSATDPDRRQSPMRYYLTGSKMFDINDNGTIITTNMLDREVSAWYNLTVTATETYNVQQISSAHVYVQVFNINDNAPEFSQFYETYVCENAESGEIVQIISAIDRDESIEDHHFYFNHSLEDTNNSSFMLTDNQDNTAVILSNRTGFNLKEEPVFYMIILIADNGIPSLTSTNTLTIQVCDCGDSRNTETCANKGLLFIMGFRTEAIIAIMICVMVIFGFFFLILALKQRRKETLFPEKTEDFRENIFCYDDEGGGEEDSEAFDIVELRQSTVMRERKPQRSKSAEIRSLYRQSLQVGPDSAIFRKFILEKLEEANTDPCAPPFDSLQTFAYEGTGSSAGSLSSLASRDTDQEDDFDYLNDLGPRFKRLASMFGSAVQPNN

SEQ ID NO: 955 - DNA, 2190 bp, artificial
  huCDH19 (44-249) muCDH19 (248-770)
ggctgggtgtggaaccaattttttgtaccagaggaaatgaatacgactagtcatcacatcggccagctaagatctgatttagacaatggaaacaattctttccagtacaagcttttgggagctggagctggaagtacttttatcattgatgaaagaacaggtgacatatatgccatacagaagcttgatagagaggagcgatccctctacatcttaagagcccaggtaatagacatcgctactggaagggctgtggaacctgagtctgagtttgtcatcaaagtttcggatatcaatgacaatgaaccaaaattcctagatgaaccttatgaggccattgtaccagagatgtctccagaaggaacattagttatccaggtgacagcaagtgatgctgacgatccctcaagtggtaataatgctcgtctcctctacagcttacttcaaggccagccatatttttctgttgaaccaacaacaggagtcataagaatatcttctaaaatggatagagaactgcaagatgagtattgggtaatcattcaagccaaggacatgattggtcagccaggagcgttgtctggaacaacaagtgtattaattaaactttcagatgttaatgacaacaagccaatattcaaagaaagtttctaccgcttcactatatctgaatctgcacccattggaacatcaatagggaaaattatggcatatgatgatgacataggggagaatgcagagatggagtacagcattgaagatgatgattcaaaaatatttgacataatcattgacaatgacacccaagaagggatagttatacttaaaaagaaagttgattttgagcagcagagctattatggcattagagctaaggttaaaaactgccatgtggatgaagagcttgcacctgcccatgttaacgcttccacaacctacattaaagttcaagtagaagatgaagatgaacctcctgttttcctcttaccatattacatacttgaaattcctgaaggaaaaccatatggaacaattgtggggacggtttctgccacagacccagatcgaagacaatctcctatgagatattatctcactggaagcaaaatgtttgatatcaatgacaatggaacaataatcaccactaacatgcttgacagagaggtcagtgcttggtacaacttgactgtcacagctactgaaacatacaatgtacaacagatctcttcagcccatgtttatgtacaagtctttaacattaacgacaatgctccagagttctctcaattctatgagacttatgtttgtgaaaatgctgaatctggtgagatagttcagatcatcagtgcaattgatagagatgagtccatagaagatcaccatttttactttaatcactctctggaagacacaaacaactcaagttttatgctaacagacaatcaagataacacagctgtaattctgagtaatagaactggtttcaatcttaaagaagagcctgtcttctacatgatcatcttgattgctgataacgggatcccatctctcacaagcacaaacactctcactatccaagtctgtgactgtggagacagtagaaacacagaaacttgtgctaacaagggacttctctttatcatgggattcagaacagaggcaataattgccatcatgatatgtgttatggtaatatttgggtttttctttttgattcttgctctgaaacagcgaagaaaggagactctatttccagagaagactgaagactttagggagaatatattttgctatgatgatgaaggcggcggggaagaagactcggaagcctttgacatcgtagagctgagacaaagtacagtaatgagagaaagaaagcctcagagaagcaagagtgcggagatcaggagcttgtacaggcagtccctgcaggtgggcccagacagtgccatatttcgaaaatttatcctagagaagcttgaagaagccaacacagacccatgtgctcccccctttgattcactacagacgtttgcctatgagggaacagggtcatcagctggctctctgagctccttggcatccagagacactgatcaggaggatgacttcgactaccttaatgacctgggacctcgttttaaaagattagcaagcatgtttggctctgcagtacaacccaacaattag

SEQ ID NO: 956 - protein, 727 aa, artificial
  muCDH19 (44-139) huCDH19 (142-249) muCDH19 (248-770)
AWVWRPFVVLEEMDDIQCVGKLRSDLDNGNNSFQYKLLGIGAGSFSINERTGEICAIQKLDREEKSLYILRAQVIDTTIGKAVETESEFVIRVLDINDNEPKFLDEPYEAIVPEMSPEGTLVIQVTASDADDPSSGNNARLLYSLLQGQPYFSVEPTTGVIRISSKMDRELQDEYWVIIQAKDMIGQPGALSGTTSVLIKLSDVNDNKPIFKESFYRFTISESAPIGTSIGKIMAYDDDIGENAEMEYSIEDDDSKIFDIIIDNDTQEGIVILKKKVDFEQQSYYGIRAKVKNCHVDEELAPAHVNASTTYIKVQVEDEDEPPVFLLPYYILEIPEGKPYGTIVGTVSATDPDRRQSPMRYYLTGSKMFDINDNGTIITTNMLDREVSAWYNLTVTATETYNVQQISSAHVYVQVFNINDNAPEFSQFYETYVCENAESGEIVQIISAIDRDESIEDHHFYFNHSLEDTNNSSFMLTDNQDNTAVILSNRTGFNLKEEPVFYMIILIADNGIPSLTSTNTLTIQVCDCGDSRNTETCANKGLLFIMGFRTEAIIAIMICVMVIFGFFFLILALKQRRKETLFPEKTEDFRENIFCYDDEGGGEEDSEAFDIVELRQSTVMRERKPQRSKSAEIRSLYRQSLQVGPDSAIFRKFILEKLEEANTDPCAPPFDSLQTFAYEGTGSSAGSLSSLASRDTDQEDDFDYLNDLGPRFKRLASMFGSAVQPNN

SEQ ID NO: 957 - DNA, 2184 bp, artificial
  muCDH19 (44-139) huCDH19 (142-249) muCDH19 (248-770)
gcctgggtgtggagaccatttgttgttctagaagaaatggatgatatacaatgtgttggaaagctaagatctgacttagacaatggaaacaactctttccagtacaagctactggggattggcgctggaagctttagcattaatgaaagaacaggtgaaatatgtgccatacagaagcttgatagagaggaaaaatccctctacattctgagagcccaggtaatagacaccactattgggaaggctgtggaaactgaatccgagtttgtcatcagagttttggatatcaatgacaatgaaccaaaattcctagatgaaccttatgaggccattgtaccagagatgtctccagaaggaacattagttatccaggtgacagcaagtgatgctgacgatccctcaagtggtaataatgctcgtctcctctacagcttacttcaaggccagccatatttttctgttgaaccaacaacaggagtcataagaatatcttctaaaatggatagagaactgcaagatgagtattgggtaatcattcaagccaaggacatgattggtcagccaggagcgttgtctggaacaacaagtgtattaattaaactttcagatgttaatgacaacaagccaatattcaaagaaagtttctaccgcttcactatatctgaatctgcacccattggaacatcaatagggaaaattatggcatatgatgatgacataggggagaatgcagagatggagtacagcattgaagatgatgattcaaaaatatttgacataatcattgacaatgacacccaagaagggatagttatacttaaaaagaaagttgattttgagcagcagagctattatggcattagagctaaggttaaaaactgccatgtggatgaagagcttgcacctgcccatgttaacgcttccacaacctacattaaagttcaagtagaagatgaagatgaacctcctgttttcctcttaccatattacatacttgaaattcctgaaggaaaaccatatggaacaattgtggggacggtttctgccacagacccagatcgaagacaatctcctatgagatattatctcactggaagcaaaatgtttgatatcaatgacaatggaacaataatcaccactaacatgcttgacagagaggtcagtgcttggtacaacttgactgtcacagctactgaaacatacaatgtacaacagatctcttcagcccatgtttatgtacaagtctttaacattaacgacaatgctccagagttctctcaattctatgagacttatgtttgtgaaaatgctgaatctggtgagatagttcagatcatcagtgcaattgatagagatgagtccatagaagatcaccatttttactttaatcactctctggaagacacaaacaactcaagttttatgctaacagacaatcaagataacacagctgtaattctgagtaatagaactggtttcaatcttaaagaagagcctgtcttctacatgatcatcttgattgctgataacgggatcccatctctcacaagcacaaacactctcactatccaagtctgtgactgtggagacagtagaaacacagaaacttgtgctaacaagggacttctctttatcatgggattcagaacagaggcaataattgccatcatgatatgtgttatggtaatatttgggtttttctttttgattcttgctctgaaacagcgaagaaaggagactctatttccagagaagactgaagactttagggagaatatattttgctatgatgatgaaggcggcggggaagaagactcggaagcctttgacatcgtagagctgagacaaagtacagtaatgagagaaagaaagcctcagagaagcaagagtgcggagatcaggagcttgtacaggcagtccctgcaggtgggcccagacagtgccatatttcgaaaatttatcctagagaagcttgaagaagccaacacagacccatgtgctcccccctttgattcactacagacgtttgcctatgagggaacagggtcatcagctggctctctgagctccttggcatccagagacactgatcaggaggatgacttcgactaccttaatgacctgggacctcgttttaaaagattagcaagcatgtttggctctgcagtacaacccaacaattag

SEQ ID NO: 958 - protein, 727 aa, artificial
  muCDH19 (44-139) huCDH19 (142-364) muCDH19 (363-770)
AWVWRPFVVLEEMDDIQCVGKLRSDLDNGNNSFQYKLLGIGAGSFSINERTGEICAIQKLDREEKSLYILRAQVIDTTIGKAVETESEFVIRVLDINDNEPKFLDEPYEAIVPEMSPEGTLVIQVTASDADDPSSGNNARLLYSLLQGQPYFSVEPTTGVIRISSKMDRELQDEYWVIIQAKDMIGQPGALSGTTSVLIKLSDVNDNKPIFKESLYRLTVSESAPTGTSIGTIMAYDNDIGENAEMDYSIEEDDSQTFDIITNHETQEGIVILKKKVDFEHQNHYGIRAKVKNHHVPEQLMKYHTEASTTFIKIQVEDVDEPPVFLLPYYILEIPEGKPYGTIVGTVSATDPDRRQSPMRYYLTGSKMFDINDNGTIITTNMLDREVSAWYNLTVTATETYNVQQISSAHVYVQVFNINDNAPEFSQFYETYVCENAESGEIVQIISAIDRDESIEDHHFYFNHSLEDTNNSSFMLTDNQDNTAVILSNRTGFNLKEEPVFYMIILIADNGIPSLTSTNTLTIQVCDCGDSRNTETCANKGLLFIMGFRTEAIIAIMICVMVIFGFFFLILALKQRRKETLFPEKTEDFRENIFCYDDEGGGEEDSEAFDIVELRQSTVMRERKPQRSKSAEIRSLYRQSLQVGPDSAIFRKFILEKLEEANTDPCAPPFDSLQTFAYEGTGSSAGSLSSLASRDTDQEDDFDYLNDLGPRFKRLASMFGSAVQPNN

SEQ ID NO: 959 - DNA, 2184 bp, artificial
  C137847 muCDH19 (44-139) huCDH19 (142-364) muCDH19 (363-770)
gcctgggtgtggagaccatttgttgttctagaagaaatggatgatatacaatgtgttggaaagctaagatctgacttagacaatggaaacaactctttccagtacaagctactggggattggcgctggaagctttagcattaatgaaagaacaggtgaaatatgtgccatacagaagcttgatagagaggaaaaatccctctacattctgagagcccaggtaatagacaccactattgggaaggctgtggaaactgaatccgagtttgtcatcagagttttggatatcaatgacaatgaaccaaaattcctagatgaaccttatgaggccattgtaccagagatgtctccagaaggaacattagttatccaggtgacagcaagtgatgctgacgatccctcaagtggtaataatgctcgtctcctctacagcttacttcaaggccagccatatttttctgttgaaccaacaacaggagtcataagaatatcttctaaaatggatagagaactgcaagatgagtattgggtaatcattcaagccaaggacatgattggtcagccaggagcgttgtctggaacaacaagtgtattaattaaactttcagatgttaatgacaataagcctatatttaaagaaagtttataccgcttgactgtctctgaatctgcacccactgggacttctataggaacaatcatggcatatgataatgacataggagagaatgcagaaatggattacagcattgaagaggatgattcgcaaacatttgacattattactaatcatgaaactcaagaaggaatagttatattaaaaaagaaagtggattttgagcaccagaaccactacggtattagagcaaaagttaaaaaccatcatgttcctgagcagctcatgaagtaccacactgaggcttccaccactttcattaagatccaggtggaagatgttgatgaacctcctgttttcctcttaccatattacatacttgaaattcctgaaggaaaaccatatggaacaattgtggggacggtttctgccacagacccagatcgaagacaatctcctatgagatattatctcactggaagcaaaatgtttgatatcaatgacaatggaacaataatcaccactaacatgcttgacagagaggtcagtgcttggtacaacttgactgtcacagctactgaaacatacaatgtacaacagatctcttcagcccatgtttatgtacaagtctttaacattaacgacaatgctccagagttctctcaattctatgagacttatgtttgtgaaaatgctgaatctggtgagatagttcagatcatcagtgcaattgatagagatgagtccatagaagatcaccatttttactttaatcactctctggaagacacaaacaactcaagttttatgctaacagacaatcaagataacacagctgtaattctgagtaatagaactggtttcaatcttaaagaagagcctgtcttctacatgatcatcttgattgctgataacgggatcccatctctcacaagcacaaacactctcactatccaagtctgtgactgtggagacagtagaaacacagaaacttgtgctaacaagggacttctctttatcatgggattcagaacagaggcaataattgccatcatgatatgtgttatggtaatatttgggtttttctttttgattcttgctctgaaacagcgaagaaaggagactctatttccagagaagactgaagactttagggagaatatattttgctatgatgatgaaggcggcggggaagaagactcggaagcctttgacatcgtagagctgagacaaagtacagtaatgagagaaagaaagcctcagagaagcaagagtgcggagatcaggagcttgtacaggcagtccctgcaggtgggcccagacagtgccatatttcgaaaatttatcctagagaagcttgaagaagccaacacagacccatgtgctcccccctttgattcactacagacgtttgcctatgagggaacagggtcatcagctggctctctgagctccttggcatccagagacactgatcaggaggatgacttcgactaccttaatgacctgggacctcgttttaaaagattagcaagcatgtttggctctgcagtacaacccaacaattag

SEQ ID NO: 960 - protein, 727 aa, artificial
  C137911 muCDH19 (44-247) huCDH19 (250-364) muCDH19 (363-770)
AWVWRPFVVLEEMDDIQCVGKLRSDLDNGNNSFQYKLLGIGAGSFSINERTGEICAIQKLDREEKSLYILRAQVIDTTIGKAVETESEFVIRVLDINDNEPRFLDEPYEAIVPEMSPEGTFVIKVTANDADDPSTGYHARILYNLERGQPYFSVEPTTGVIRISSKMDRELQDTYCVIIQAKDMLGQPGALSGTTTVSIKLSDINDNKPIFKESLYRLTVSESAPTGTSIGTIMAYDNDIGENAEMDYSIEEDDSQTFDIITNHETQEGIVILKKKVDFEHQNHYGIRAKVKNHHVPEQLMKYHTEASTTFIKIQVEDVDEPPVFLLPYYILEIPEGKPYGTIVGTVSATDPDRRQSPMRYYLTGSKMFDINDNGTIITTNMLDREVSAWYNLTVTATETYNVQQISSAHVYVQVFNINDNAPEFSQFYETYVCENAESGEIVQIISAIDRDESIEDHHFYFNHSLEDTNNSSFMLTDNQDNTAVILSNRTGFNLKEEPVFYMIILIADNGIPSLTSTNTLTIQVCDCGDSRNTETCANKGLLFIMGFRTEAIIAIMICVMVIFGFFFLILALKQRRKETLFPEKTEDFRENIFCYDDEGGGEEDSEAFDIVELRQSTVMRERKPQRSKSAEIRSLYRQSLQVGPDSAIFRKFILEKLEEANTDPCAPPFDSLQTFAYEGTGSSAGSLSSLASRDTDQEDDFDYLNDLGPRFKRLASMFGSAVQPNN

SEQ ID NO: 961 - DNA, 2184 bp, artificial
  C137911 muCDH19 (44-247) huCDH19 (250-364) muCDH19 (363-770)
gcctgggtgtggagaccatttgttgttctagaagaaatggatgatatacaatgtgttggaaagctaagatctgacttagacaatggaaacaactctttccagtacaagctactggggattggcgctggaagctttagcattaatgaaagaacaggtgaaatatgtgccatacagaagcttgatagagaggaaaaatccctctacattctgagagcccaggtaatagacaccactattgggaaggctgtggaaactgaatccgagtttgtcatcagagttttggatatcaatgacaatgaacccagattcctagatgaaccatatgaggccattgtacctgagatgtctccagaaggaacatttgtcatcaaggtgacagccaatgacgcagatgatccttcaactggctatcatgctcgcatcctatacaacttagaacgaggtcaaccatacttttctgttgagccaacaacaggagtcataaggatatcttctaagatggatagagagttgcaagatacatactgtgtaattattcaagccaaggacatgctcggtcagcctggagccttgtctggaacaacaaccgtatcaattaagctgtcagatattaatgacaataagcctatatttaaagaaagtttataccgcttgactgtctctgaatctgcacccactgggacttctataggaacaatcatggcatatgataatgacataggagagaatgcagaaatggattacagcattgaagaggatgattcgcaaacatttgacattattactaatcatgaaactcaagaaggaatagttatattaaaaaagaaagtggattttgagcaccagaaccactacggtattagagcaaaagttaaaaaccatcatgttcctgagcagctcatgaagtaccacactgaggcttccaccactttcattaagatccaggtggaagatgttgatgaacctcctgttttcctcttaccatattacatacttgaaattcctgaaggaaaaccatatggaacaattgtggggacggtttctgccacagacccagatcgaagacaatctcctatgagatattatctcactggaagcaaaatgtttgatatcaatgacaatggaacaataatcaccactaacatgcttgacagagaggtcagtgcttggtacaacttgactgtcacagctactgaaacatacaatgtacaacagatctcttcagcccatgtttatgtacaagtctttaacattaacgacaatgctccagagttctctcaattctatgagacttatgtttgtgaaaatgctgaatctggtgagatagttcagatcatcagtgcaattgatagagatgagtccatagaagatcaccatttttactttaatcactctctggaagacacaaacaactcaagttttatgctaacagacaatcaagataacacagctgtaattctgagtaatagaactggtttcaatcttaaagaagagcctgtcttctacatgatcatcttgattgctgataacgggatcccatctctcacaagcacaaacactctcactatccaagtctgtgactgtggagacagtagaaacacagaaacttgtgctaacaagggacttctctttatcatgggattcagaacagaggcaataattgccatcatgatatgtgttatggtaatatttgggtttttctttttgattcttgctctgaaacagcgaagaaaggagactctatttccagagaagactgaagactttagggagaatatattttgctatgatgatgaaggcggcggggaagaagactcggaagcctttgacatcgtagagctgagacaaagtacagtaatgagagaaagaaagcctcagagaagcaagagtgcggagatcaggagcttgtacaggcagtccctgcaggtgggcccagacagtgccatatttcgaaaatttatcctagagaagcttgaagaagccaacacagacccatgtgctcccccctttgattcactacagacgtttgcctatgagggaacagggtcatcagctggctctctgagctccttggcatccagagacactgatcaggaggatgacttcgactaccttaatgacctgggacctcgttttaaaagattagcaagcatgtttggctctgcagtacaacccaacaattag

SEQ ID NO: 962 - protein, 727 aa, artificial
  C137917 muCDH19 (44-362) huCDH19 (365-772)
AWVWRPFVVLEEMDDIQCVGKLRSDLDNGNNSFQYKLLGIGAGSFSINERTGEICAIQKLDREEKSLYILRAQVIDTTIGKAVETESEFVIRVLDINDNEPRFLDEPYEAIVPEMSPEGTFVIKVTANDADDPSTGYHARILYNLERGQPYFSVEPTTGVIRISSKMDRELQDTYCVIIQAKDMLGQPGALSGTTTVSIKLSDINDNKPIFKESFYRFTISESAPIGTSIGKIMAYDDDIGENAEMEYSIEDDDSKIFDIIIDNDTQEGIVILKKKVDFEQQSYYGIRAKVKNCHVDEELAPAHVNASTTYIKVQVEDEDEPPLFLLPYYVFEVFEETPQGSFVGVVSATDPDNRKSPIRYSITRSKVFNINDNGTITTSNSLDREISAWYNLSITATEKYNIEQISSIPLYVQVLNINDHAPEFSQYYETYVCENAGSGQVIQTISAVDRDESIEEHHFYFNLSVEDTNNSSFTIIDNQDNTAVILTNRTGFNLQEEPVFYISILIADNGIPSLTSTNTLTIHVCDCGDSGSTQTCQYQELVLSMGFKTEVIIAILICIMIIFGFIFLTLGLKQRRKQILFPEKSEDFRENIFQYDDEGGGEEDTEAFDIAELRSSTIMRERKTRKTTSAEIRSLYRQSLQVGPDSAIFRKFILEKLEEANTDPCAPPFDSLQTYAFEGTGSLAGSLSSLESAVSDQDESYDYLNELGPRFKRLACMFGSAVQSNN

SEQ ID NO: 963 - protein, 2184 aa, artificial
  C137917 muCDH19 (44-362) huCDH19 (365-772)
GCCTGGGTGTGGAGACCATTTGTTGTTCTAGAAGAAATGGATGATATACAATGTGTTGGAAAGCTAAGATCTGACTTAGACAATGGAAACAACTCTTTCCAGTACAAGCTACTGGGGATTGGCGCTGGAAGCTTTAGCATTAATGAAAGAACAGGTGAAATATGTGCCATACAGAAGCTTGATAGAGAGGAAAAATCCCTCTACATTCTGAGAGCCCAGGTAATAGACACCACTATTGGGAAGGCTGTGGAAACTGAATCCGAGTTTGTCATCAGAGTTTTGGATATCAATGACAATGAACCCAGATTCCTAGATGAACCATATGAGGCCATTGTACCTGAGATGTCTCCAGAAGGAACATTTGTCATCAAGGTGACAGCCAATGACGCAGATGATCCTTCAACTGGCTATCATGCTCGCATCCTATACAACTTAGAACGAGGTCAACCATACTTTTCTGTTGAGCCAACAACAGGAGTCATAAGGATATCTTCTAAGATGGATAGAGAGTTGCAAGATACATACTGTGTAATTATTCAAGCCAAGGACATGCTCGGTCAGCCTGGAGCCTTGTCTGGAACAACAACCGTATCAATTAAGCTGTCAGATATTAATGACAACAAGCCAATATTCAAAGAAAGTTTCTACCGCTTCACTATATCTGAATCTGCACCCATTGGAACATCAATAGGGAAAATTATGGCATATGATGATGACATAGGGGAGAATGCAGAGATGGAGTACAGCATTGAAGATGATGATTCAAAAATATTTGACATAATCATTGACAATGACACCCAAGAAGGGATAGTTATACTTAAAAAGAAAGTTGATTTTGAGCAGCAGAGCTATTATGGCATTAGAGCTAAGGTTAAAAACTGCCATGTGGATGAAGAGCTTGCACCTGCCCATGTTAACGCTTCCACAACCTACATTAAAGTTCAAGTAGAAGATGAAGATGAGCCTCCTCTTTTCCTCCTTCCATATTATGTATTTGAAGTTTTTGAAGAAACCCCACAGGGATCATTTGTAGGCGTGGTGTCTGCCACAGACCCAGACAATAGGAAATCTCCTATCAGGTATTCTATTACTAGGAGCAAAGTGTTCAATATCAATGATAATGGTACAATCACTACAAGTAACTCACTGGATCGTGAAATCAGTGCTTGGTACAACCTAAGTATTACAGCCACAGAAAAATACAATATAGAACAGATCTCTTCGATCCCACTGTATGTGCAAGTTCTTAACATCAATGATCATGCTCCTGAGTTCTCTCAATACTATGAGACTTATGTTTGTGAAAATGCAGGCTCTGGTCAGGTAATTCAGACTATCAGTGCAGTGGATAGAGATGAATCCATAGAAGAGCACCATTTTTACTTTAATCTATCTGTAGAAGACACTAACAATTCAAGTTTTACAATCATAGATAATCAAGATAACACAGCTGTCATTTTGACTAATAGAACTGGTTTTAACCTTCAAGAAGAACCTGTCTTCTACATCTCCATCTTAATTGCCGACAATGGAATCCCGTCACTTACAAGTACAAACACCCTTACCATCCATGTCTGTGACTGTGGTGACAGTGGGAGCACACAGACCTGCCAGTACCAGGAGCTTGTGCTTTCCATGGGATTCAAGACAGAAGTCATCATTGCTATTCTCATTTGCATTATGATCATATTTGGGTTTATTTTTTTGACTTTGGGTTTAAAACAACGGAGAAAACAGATTCTATTTCCTGAGAAAAGTGAAGATTTCAGAGAGAATATATTCCAATATGATGATGAAGGGGGTGGAGAAGAAGATACAGAGGCCTTTGATATAGCAGAGCTGAGGAGTAGTACCATAATGCGGGAACGCAAGACTCGGAAAACCACAAGCGCTGAGATCAGGAGCCTATACAGGCAGTCTTTGCAAGTTGGCCCCGACAGTGCCATATTCAGGAAATTCATTCTGGAAAAGCTCGAAGAAGCTAATACTGATCCGTGTGCCCCTCCTTTTGATTCCCTCCAGACCTACGCTTTTGAGGGAACAGGGTCATTAGCTGGATCCCTGAGCTCCTTAGAATCAGCAGTCTCTGATCAGGATGAAAGCTATGATTACCTTAATGAGTTGGGACCTCGCTTTAAAAGATTAGCATGCATGTTTGGTTCTGCAGTGCAGTCAAATAATTAG

SEQ ID NO: 964 - protein, 727 aa, artificial
  C137915 muCDH19 (44-461) huCDH19 (464-772)
AWVWRPFVVLEEMDDIQCVGKLRSDLDNGNNSFQYKLLGIGAGSFSINERTGEICAIQKLDREEKSLYILRAQVIDTTIGKAVETESEFVIRVLDINDNEPRFLDEPYEAIVPEMSPEGTFVIKVTANDADDPSTGYHARILYNLERGQPYFSVEPTTGVIRISSKMDRELQDTYCVIIQAKDMLGQPGALSGTTTVSIKLSDINDNKPIFKESFYRFTISESAPIGTSIGKIMAYDDDIGENAEMEYSIEDDDSKIFDIIIDNDTQEGIVILKKKVDFEQQSYYGIRAKVKNCHVDEELAPAHVNASTTYIKVQVEDEDEPPVFLLPYYILEIPEGKPYGTIVGTVSATDPDRRQSPMRYYLTGSKMFDINDNGTIITTNMLDREVSAWYNLTVTATETYNVQQISSAHVYVQVFNINDHAPEFSQYYETYVCENAGSGQVIQTISAVDRDESIEEHHFYFNLSVEDTNNSSFTIIDNQDNTAVILTNRTGFNLQEEPVFYISILIADNGIPSLTSTNTLTIHVCDCGDSGSTQTCQYQELVLSMGFKTEVIIAILICIMIIFGFIFLTLGLKQRRKQILFPEKSEDFRENIFQYDDEGGGEEDTEAFDIAELRSSTIMRERKTRKTTSAEIRSLYRQSLQVGPDSAIFRKFILEKLEEANTDPCAPPFDSLQTYAFEGTGSLAGSLSSLESAVSDQDESYDYLNELGPRFKRLACMFGSAVQSNN

SEQ ID NO: 965 - DNA, 2184 bp, artificial
  C137915 muCDH19 (44-461) huCDH19 (464-772)
gcctgggtgtggagaccatttgttgttctagaagaaatggatgatatacaatgtgttggaaagctaagatctgacttagacaatggaaacaactctttccagtacaagctactggggattggcgctggaagctttagcattaatgaaagaacaggtgaaatatgtgccatacagaagcttgatagagaggaaaaatccctctacattctgagagcccaggtaatagacaccactattgggaaggctgtggaaactgaatccgagtttgtcatcagagttttggatatcaatgacaatgaacccagattcctagatgaaccatatgaggccattgtacctgagatgtctccagaaggaacatttgtcatcaaggtgacagccaatgacgcagatgatccttcaactggctatcatgctcgcatcctatacaacttagaacgaggtcaaccatacttttctgttgagccaacaacaggagtcataaggatatcttctaagatggatagagagttgcaagatacatactgtgtaattattcaagccaaggacatgctcggtcagcctggagccttgtctggaacaacaaccgtatcaattaagctgtcagatattaatgacaacaagccaatattcaaagaaagtttctaccgcttcactatatctgaatctgcacccattggaacatcaatagggaaaattatggcatatgatgatgacataggggagaatgcagagatggagtacagcattgaagatgatgattcaaaaatatttgacataatcattgacaatgacacccaagaagggatagttatacttaaaaagaaagttgattttgagcagcagagctattatggcattagagctaaggttaaaaactgccatgtggatgaagagcttgcacctgcccatgttaacgcttccacaacctacattaaagttcaagtagaagatgaagatgaacctcctgttttcctcttaccatattacatacttgaaattcctgaaggaaaaccatatggaacaattgtggggacggtttctgccacagacccagatcgaagacaatctcctatgagatattatctcactggaagcaaaatgtttgatatcaatgacaatggaacaataatcaccactaacatgcttgacagagaggtcagtgcttggtacaacttgactgtcacagctactgaaacatacaatgtacaacagatctcttcagcccatgtttatgtacaagtctttaacattaatgatcatgctcctgagttctctcaatactatgagacttatgtttgtgaaaatgcaggctctggtcaggtaattcagactatcagtgcagtggatagagatgaatccatagaagagcaccatttttactttaatctatctgtagaagacactaacaattcaagttttacaatcatagataatcaagataacacagctgtcattttgactaatagaactggttttaaccttcaagaagaacctgtcttctacatctccatcttaattgccgacaatggaatcccgtcacttacaagtacaaacacccttaccatccatgtctgtgactgtggtgacagtgggagcacacagacctgccagtaccaggagcttgtgctttccatgggattcaagacagaagtcatcattgctattctcatttgcattatgatcatatttgggtttatttttttgactttgggtttaaaacaacggagaaaacagattctatttcctgagaaaagtgaagatttcagagagaatatattccaatatgatgatgaagggggtggagaagaagatacagaggcctttgatatagcagagctgaggagtagtaccataatgcgggaacgcaagactcggaaaaccacaagcgctgagatcaggagcctatacaggcagtctttgcaagttggccccgacagtgccatattcaggaaattcattctggaaaagctcgaagaagctaatactgatccgtgtgcccctccttttgattccctccagacctacgcttttgagggaacagggtcattagctggatccctgagctccttagaatcagcagtctctgatcaggatgaaagctatgattaccttaatgagttgggacctcgctttaaaagattagcatgcatgtttggttctgcagtgcagtcaaataattag

SEQ ID NO: 966 - protein, 727 aa, artificial
  C71144 muCDH19 (44-770)
AWVWRPFVVLEEMDDIQCVGKLRSDLDNGNNSFQYKLLGIGAGSFSINERTGEICAIQKLDREEKSLYILRAQVIDTTIGKAVETESEFVIRVLDINDNEPRFLDEPYEAIVPEMSPEGTFVIKVTANDADDPSTGYHARILYNLERGQPYFSVEPTTGVIRISSKMDRELQDTYCVIIQAKDMLGQPGALSGTTTVSIKLSDINDNKPIFKESFYRFTISESAPIGTSIGKIMAYDDDIGENAEMEYSIEDDDSKIFDIIIDNDTQEGIVILKKKVDFEQQSYYGIRAKVKNCHVDEELAPAHVNASTTYIKVQVEDEDEPPVFLLPYYILEIPEGKPYGTIVGTVSATDPDRRQSPMRYYLTGSKMFDINDNGTIITTNMLDREVSAWYNLTVTATETYNVQQISSAHVYVQVFNINDNAPEFSQFYETYVCENAESGEIVQIISAIDRDESIEDHHFYFNHSLEDTNNSSFMLTDNQDNTAVILSNRTGFNLKEEPVFYMIILIADNGIPSLTSTNTLTIQVCDCGDSRNTETCANKGLLFIMGFRTEAIIAIMICVMVIFGFFFLILALKQRRKETLFPEKTEDFRENIFCYDDEGGGEEDSEAFDIVELRQSTVMRERKPQRSKSAEIRSLYRQSLQVGPDSAIFRKFILEKLEEANTDPCAPPFDSLQTFAYEGTGSSAGSLSSLASRDTDQEDDFDYLNDLGPRFKRLASMFGSAVQPNN

SEQ ID NO: 967 - protein, 2184 aa, artificial
  C71144 muCDH19 (44-770)
GCCTGGGTGTGGAGACCATTTGTTGTTCTAGAAGAAATGGATGATATACAATGTGTTGGAAAGCTAAGATCTGACTTAGACAATGGAAACAACTCTTTCCAGTACAAGCTACTGGGGATTGGCGCTGGAAGCTTTAGCATTAATGAAAGAACAGGTGAAATATGTGCCATACAGAAGCTTGATAGAGAGGAAAAATCCCTCTACATTCTGAGAGCCCAGGTAATAGACACCACTATTGGGAAGGCTGTGGAAACTGAATCCGAGTTTGTCATCAGAGTTTTGGATATCAATGACAATGAACCCAGATTCCTAGATGAACCATATGAGGCCATTGTACCTGAGATGTCTCCAGAAGGAACATTTGTCATCAAGGTGACAGCCAATGACGCAGATGATCCTTCAACTGGCTATCATGCTCGCATCCTATACAACTTAGAACGAGGTCAACCATACTTTTCTGTTGAGCCAACAACAGGAGTCATAAGGATATCTTCTAAGATGGATAGAGAGTTGCAAGATACATACTGTGTAATTATTCAAGCCAAGGACATGCTCGGTCAGCCTGGAGCCTTGTCTGGAACAACAACCGTATCAATTAAGCTGTCAGATATTAATGACAACAAGCCAATATTCAAAGAAAGTTTCTACCGCTTCACTATATCTGAATCTGCACCCATTGGAACATCAATAGGGAAAATTATGGCATATGATGATGACATAGGGGAGAATGCAGAGATGGAGTACAGCATTGAAGATGATGATTCAAAAATATTTGACATAATCATTGACAATGACACCCAAGAAGGGATAGTTATACTTAAAAAGAAAGTTGATTTTGAGCAGCAGAGCTATTATGGCATTAGAGCTAAGGTTAAAAACTGCCATGTGGATGAAGAGCTTGCACCTGCCCATGTTAACGCTTCCACAACCTACATTAAAGTTCAAGTAGAAGATGAAGATGAACCTCCTGTTTTCCTCTTACCATATTACATACTTGAAATTCCTGAAGGAAAACCATATGGAACAATTGTGGGGACGGTTTCTGCCACAGACCCAGATCGAAGACAATCTCCTATGAGATATTATCTCACTGGAAGCAAAATGTTTGATATCAATGACAATGGAACAATAATCACCACTAACATGCTTGACAGAGAGGTCAGTGCTTGGTACAACTTGACTGTCACAGCTACTGAAACATACAATGTACAACAGATCTCTTCAGCCCATGTTTATGTACAAGTCTTTAACATTAACGACAATGCTCCAGAGTTCTCTCAATTCTATGAGACTTATGTTTGTGAAAATGCTGAATCTGGTGAGATAGTTCAGATCATCAGTGCAATTGATAGAGATGAGTCCATAGAAGATCACCATTTTTACTTTAATCACTCTCTGGAAGACACAAACAACTCAAGTTTTATGCTAACAGACAATCAAGATAACACAGCTGTAATTCTGAGTAATAGAACTGGTTTCAATCTTAAAGAAGAGCCTGTCTTCTACATGATCATCTTGATTGCTGATAACGGGATCCCATCTCTCACAAGCACAAACACTCTCACTATCCAAGTCTGTGACTGTGGAGACAGTAGAAACACAGAAACTTGTGCTAACAAGGGACTTCTCTTTATCATGGGATTCAGAACAGAGGCAATAATTGCCATCATGATATGTGTTATGGTAATATTTGGGTTTTTCTTTTTGATTCTTGCTCTGAAACAGCGAAGAAAGGAGACTCTATTTCCAGAGAAGACTGAAGACTTTAGGGAGAATATATTTTGCTATGATGATGAAGGCGGCGGGGAAGAAGACTCGGAAGCCTTTGACATCGTAGAGCTGAGACAAAGTACAGTAATGAGAGAAAGAAAGCCTCAGAGAAGCAAGAGTGCGGAGATCAGGAGCTTGTACAGGCAGTCCCTGCAGGTGGGCCCAGACAGTGCCATATTTCGAAAATTTATCCTAGAGAAGCTTGAAGAAGCCAACACAGACCCATGTGCTCCCCCCTTTGATTCACTACAGACGTTTGCCTATGAGGGAACAGGGTCATCAGCTGGCTCTCTGAGCTCCTTGGCATCCAGAGACACTGATCAGGAGGATGACTTCGACTACCTTAATGACCTGGGACCTCGTTTTAAAAGATTAGCAAGCATGTTTGGCTCTGCAGTACAACCCAACAATTAG

SEQ ID NO: 968 - protein, 8 aa, artificial
  Flag Tag
DYKDDDDK

SEQ ID NO: 969 - DNA, 24 bp, artificial
  Flag Tag
gactacaaagacgatgacgacaag

SEQ ID NO: 970 - protein, 5 aa, artificial
  CDR-H1 of CDH19 2G6
SYGMH

SEQ ID NO: 971 - protein, 17 aa, artificial
  CDR-H2 of CDH19 2G6
FIWYDGSNKYYADSVKD

SEQ ID NO: 972 - protein, 16 aa, artificial
  CDR-H3 of CDH19 2G6
RAGIIGTIGYYYGMDV

SEQ ID NO: 973 - protein, 11 aa, artificial
  CDR-L1 of CDH19 2G6
SGDRLGEKYTC

SEQ ID NO: 974 - protein, 7 aa, artificial
  CDR-L2 of CDH19 2G6
QDTKRPS

SEQ ID NO: 975 - protein, 9 aa, artificial
  CDR-L3 of CDH19 2G6
QAWDSSTVV

SEQ ID NO: 976 - DNA, 375 bp, artificial
  VH of CDH19 2G6
caggtgcagctggtggaatccggcggaggcgtggtgcagcctggccggtccctgagactgtcttgcgccgcctccggcttcaccttctccagctacggcatgcactgggtccgacaggcccctggcaagggcctggaatgggtggccttcatttggtacgacggctccaacaagtactacgccgactccgtgaaggaccggttcaccatctcccgggacaactccaagaacaccctgtacctgcagatgaagtccctgcgggccgaggacaccgccgtgtactactgtgccagaagggccggcatcatcggcaccatcggctactactacggcatggacgtgtggggccagggcaccaccgtgaccgtgtctagc

SEQ ID NO: 977 - protein, 125 aa, artificial; identical to SEQ ID NO: 384
  VH of CDH19 2G6

SEQ ID NO: 978 - DNA, 315 bp, artificial
  VL of CDH19 2G6
tacgagctgacccagcccccctccgtgtccgtgtctcctggccagaccgcctccatcacctgttctggcgaccggctgggcgagaagtacacctgttggtatcagcagcggcctggccagtcccccctgctggtcatctaccaggacaccaagcggccctccggcatccctgagcggttctccggctccaactccggcaacaccgccaccctgaccatctccggcacccaggccatggacgaggccgactactactgccaggcctgggactcctccaccgtggtgttcggcggaggcaccaagctgaccgtgctg

SEQ ID NO: 979 - protein, 106 aa, artificial
  VL of CDH19 2G6
SYELTQPPSVSVSPGQTASITCSGDRLGEKYTCWYQQRPGQSPLLVIYQDTKRPSGIPERFSGSNSGNTATLTISGTQAMDEADYYCQAWDSSTVVFGGGTKLTVL

SEQ ID NO: 980 - DNA, 738 bp, artificial
  VH-VL of CDH19 2G6
caggtgcagctggtggaatccggcggaggcgtggtgcagcctggccggtccctgagactgtcttgcgccgcctccggcttcaccttctccagctacggcatgcactgggtccgacaggcccctggcaagggcctggaatgggtggccttcatttggtacgacggctccaacaagtactacgccgactccgtgaaggaccggttcaccatctcccgggacaactccaagaacaccctgtacctgcagatgaagtccctgcgggccgaggacaccgccgtgtactactgtgccagaagggccggcatcatcggcaccatcggctactactacggcatggacgtgtggggccagggcaccaccgtgaccgtgtctagcggaggcggaggatctggtggcggtggttctggcggcggaggctcctcttacgagctgacccagcccccctccgtgtccgtgtctcctggccagaccgcctccatcacctgttctggcgaccggctgggcgagaagtacacctgttggtatcagcagcggcctggccagtcccccctgctggtcatctaccaggacaccaagcggccctccggcatccctgagcggttctccggctccaactccggcaacaccgccaccctgaccatctccggcacccaggccatggacgaggccgactactactgccaggcctgggactcctccaccgtggtgttcggcggaggcaccaagctgaccgtgctg

SEQ ID NO: 981 - protein, 246 aa, artificial
  VH-VL of CDH19 2G6
QVQLVESGGGVVQPGRSLRLSCAASGFTFSSYGMHWVRQAPGKGLEWVAFIWYDGSNKYYADSVKDRFTISRDNSKNTLYLQMKSLRAEDTAVYYCARRAGIIGTIGYYYGMDVWGQGTTVTVSSGGGGSGGGGSGGGGSSYELTQPPSVSVSPGQTASITCSGDRLGEKYTCWYQQRPGQSPLLVIYQDTKRPSGIPERFSGSNSGNTATLTISGTQAMDEADYYCQAWDSSTVVFGGGTKLTVL

SEQ ID NO: 982 - protein, 507 aa, artificial
  CDH19 2G6 x I2C
QVQLVESGGGVVQPGRSLRLSCAASGFTFSSYGMHWVRQAPGKGLEWVAFIWYDGSNKYYADSVKDRFTISRDNSKNTLYLQMKSLRAEDTAVYYCARRAGIIGTIGYYYGMDVWGQGTTVTVSSGGGGSGGGGSGGGGSSYELTQPPSVSVSPGQTASITCSGDRLGEKYTCWYQQRPGQSPLLVIYQDTKRPSGIPERFSGSNSGNTATLTISGTQAMDEADYYCQAWDSSTVVFGGGTKLTVLSGGGGSEVQLVESGGGLVQPGGSLKLSCAASGFTFNKYAMNWVRQAPGKGLEWVARIRSKYNNYATYYADSVKDRFTISRDDSKNTAYLQMNNLKTEDTAVYYCVRHGNFGNSYISYWAYWGQGTLVTVSSGGGGSGGGGSGGGGSQTVVTQEPSLTVSPGGTVTLTCGSSTGAVTSGNYPNWVQQKPGQAPRGLIGGTKFLAPGTPARFSGSLLGGKAALTLSGVQPEDEAEYYCVLWYSNRWVFGGGTKLTVLHHHHHH

SEQ ID NO: 983 - protein, 5 aa, artificial
  CDR-H1 of CDH19 16E2.1
SYGMH

SEQ ID NO: 984 - protein, 17 aa, artificial
  CDR-H2 of CDH19 16E2.1
VIWYDGSNKYYADSVKG

SEQ ID NO: 985 - protein, 9 aa, artificial
  CDR-H3 of CDH19 16E2.1
DGWELSFDY

SEQ ID NO: 986 - protein, 11 aa, artificial
  CDR-L1 of CDH19 16E2.1
RASQGISNYLA

SEQ ID NO: 987 - protein, 7 aa, artificial
  CDR-L2 of CDH19 16E2.1
AASSLQS

SEQ ID NO: 988 - protein, 9 aa, artificial
  CDR-L3 of CDH19 16E2.1
QHYFTYPRT

SEQ ID NO: 989 - DNA, 354 bp, artificial
  VH of CDH19 16E2.1
caggtgcagctggtggaatccggcggaggcgtggtgcagcctggccggtccctgagactgtcttgcgccgcctccggcttcatcttctccagctacggcatgcactgggtccgacagacccccggcaagggcctggaatgggtggccgtgatttggtacgacggctccaacaagtactacgccgactccgtgaagggccggttcaccatctcccgggacatctccaagaacaccctgtacctgcagatgaactccctgcgggtggaagataccgccgtgtactactgcgccagggacggctgggagctgtccttcgattactggggccagggcaccctggtcaccgtgtctagc

SEQ ID NO: 990 - protein, 118 aa, artificial; identical to SEQ ID NO: 350
  VH of CDH19 16E2.1

SEQ ID NO: 991 - DNA, 321 bp, artificial
  VL of CDH19 16E2.1
gacatccagatgacccagtccccctccagcctgtccgcctccgtgggcgacagagtgaccatcacctgtcgggcctcccagggcatcagcaactacctggcctggctgcagcagaagcccggcaaggcccccaagtccctgatctacgccgccagctccctgcagtccggcgtgccctccaagttctccggctctggctccggcaccgacttcaccctgaccatctccagcctgcagcccgaggacttcgccacctactactgccagcactacttcacctacccccggaccttcggacagggcaccaaggtggaaatcaag

SEQ ID NO: 992 - protein, 107 aa, artificial
  VL of CDH19 16E2.1
DIQMTQSPSSLSASVGDRVTITCRASQGISNYLAWLQQKPGKAPKSLIYAASSLQSGVPSKFSGSGSGTDFTLTISSLQPEDFATYYCQHYFTYPRTFGQGTKVEIK

SEQ ID NO: 993 - DNA, 720 bp, artificial
  VH-VL of CDH19 16E2.1
caggtgcagctggtggaatccggcggaggcgtggtgcagcctggccggtccctgagactgtcttgcgccgcctccggcttcatcttctccagctacggcatgcactgggtccgacagacccccggcaagggcctggaatgggtggccgtgatttggtacgacggctccaacaagtactacgccgactccgtgaagggccggttcaccatctcccgggacatctccaagaacaccctgtacctgcagatgaactccctgcgggtggaagataccgccgtgtactactgcgccagggacggctgggagctgtccttcgattactggggccagggcaccctggtcaccgtgtctagcggaggcggaggatctggtggcggtggttctggcggcggaggctccgacatccagatgacccagtccccctccagcctgtccgcctccgtgggcgacagagtgaccatcacctgtcgggcctcccagggcatcagcaactacctggcctggctgcagcagaagcccggcaaggcccccaagtccctgatctacgccgccagctccctgcagtccggcgtgccctccaagttctccggctctggctccggcaccgacttcaccctgaccatctccagcctgcagcccgaggacttcgccacctactactgccagcactacttcacctacccccggaccttcggacagggcaccaaggtggaaatcaag

SEQ ID NO: 994 - protein, 240 aa, artificial
  VH-VL of CDH19 16E2.1
QVQLVESGGGVVQPGRSLRLSCAASGFIFSSYGMHWVRQTPGKGLEWVAVIWYDGSNKYYADSVKGRFTISRDISKNTLYLQMNSLRVEDTAVYYCARDGWELSFDYWGQGTLVTVSSGGGGSGGGGSGGGGSDIQMTQSPSSLSASVGDRVTITCRASQGISNYLAWLQQKPGKAPKSLIYAASSLQSGVPSKFSGSGSGTDFTLTISSLQPEDFATYYCQHYFTYPRTFGQGTKVEIK

SEQ ID NO: 995 - protein, 501 aa, artificial
  CDH19 16E2.1 x I2C
QVQLVESGGGVVQPGRSLRLSCAASGFIFSSYGMHWVRQTPGKGLEWVAVIWYDGSNKYYADSVKGRFTISRDISKNTLYLQMNSLRVEDTAVYYCARDGWELSFDYWGQGTLVTVSSGGGGSGGGGSGGGGSDIQMTQSPSSLSASVGDRVTITCRASQGISNYLAWLQQKPGKAPKSLIYAASSLQSGVPSKFSGSGSGTDFTLTISSLQPEDFATYYCQHYFTYPRTFGQGTKVEIKSGGGGSEVQLVESGGGLVQPGGSLKLSCAASGFTFNKYAMNWVRQAPGKGLEWVARIRSKYNNYATYYADSVKDRFTISRDDSKNTAYLQMNNLKTEDTAVYYCVRHGNFGNSYISYWAYWGQGTLVTVSSGGGGSGGGGSGGGGSQTVVTQEPSLTVSPGGTVTLTCGSSTGAVTSGNYPNWVQQKPGQAPRGLIGGTKFLAPGTPARFSGSLLGGKAALTLSGVQPEDEAEYYCVLWYSNRWVFGGGTKLTVLHHHHHH

SEQ ID NO: 996 - protein, 5 aa, artificial
  CDR-H1 of CDH19 17H8.2
SYYWS

SEQ ID NO: 997 - protein, 16 aa, artificial
  CDR-H2 of CDH19 17H8.2
YIYYIGSTNYNPSLKS

SEQ ID NO: 998 - protein, 14 aa, artificial
  CDR-H3 of CDH19 17H8.2
DSRYRSGWYDAFDI

SEQ ID NO: 999 - protein, 12 aa, artificial
  CDR-L1 of CDH19 17H8.2
RASQSVAGSYLA

SEQ ID NO: 1000 - protein, 7 aa, artificial
  CDR-L2 of CDH19 17H8.2
GASSRAT

SEQ ID NO: 1001 - protein, 9 aa, artificial
  CDR-L3 of CDH19 17H8.2
QQYGKSPIT

SEQ ID NO: 1002 - DNA, 366 bp, artificial
  VH of CDH19 17H8.2
caggtgcagctgcaggaatccggccctggcctggtcaagccctccgagacactgtccctgacctgcaccgtgtccggcggctccatcaactcctactactggtcctggatccggcagccccctggcaagggcctggaatggatcggctacatctactacatcggctccaccaactacaaccccagcctgaagtccagagtgaccatctccgtggacacctccaagaaccagttctccctgaagctgtcctccgtgaccgccgctgacaccgccctgtactactgcgccagagactcccggtacagatccgggtggtacgacgccttcgacatctggggccagggcaccatggtcaccgtgtcctct

SEQ ID NO: 1003 - protein, 122 aa, artificial; identical to SEQ ID NO: 338
  VH of CDH19 17H8.2

SEQ ID NO: 1004 - protein, 324 aa, artificial
  VL of CDH19 17H8.2
GATATCGTGCTGACCCAGTCCCCCGGCACCCTGTCTCTGAGCCCTGGCGAGAGAGCCACCCTGTCCTGCAGAGCCTCTCAGTCCGTGGCCGGCTCCTACCTGGCTTGGTATCAGCAGAAGCCCGGCCAGGCCCCTCGGCTGCTGATCTCCGGCGCCTCTTCTAGAGCCACCGGCATCCCTGACCGGTTCTCCGGCTCTGGCTCCGGCACCGACTTCACCCTGACCATCAGCCGGCTGGAACCCGAGGACTTCGCCGTGTACTATTGCCAGCAGTACGGCAAGTCCCCCATCACCTTCGGCCAGGGAACCCGGCTGGAAATGAAG

SEQ ID NO: 1005 - protein, 108 aa, artificial
  VL of CDH19 17H8.2
DIVLTQSPGTLSLSPGERATLSCRASQSVAGSYLAWYQQKPGQAPRLLISGASSRATGIPDRFSGSGSGTDFTLTISRLEPEDFAVYYCQQYGKSPITFGQGTRLEMK

SEQ ID NO: 1006 - DNA, 735 bp, artificial
  VH-VL of CDH19 17H8.2
caggtgcagctgcaggaatccggccctggcctggtcaagccctccgagacactgtccctgacctgcaccgtgtccggcggctccatcaactcctactactggtcctggatccggcagccccctggcaagggcctggaatggatcggctacatctactacatcggctccaccaactacaaccccagcctgaagtccagagtgaccatctccgtggacacctccaagaaccagttctccctgaagctgtcctccgtgaccgccgctgacaccgccctgtactactgcgccagagactcccggtacagatccgggtggtacgacgccttcgacatctggggccagggcaccatggtcaccgtgtcctctggtggcggaggctctggcggaggtggaagcggaggcggcggatccgatatcgtgctgacccagtcccccggcaccctgtctctgagccctggcgagagagccaccctgtcctgcagagcctctcagtccgtggccggctcctacctggcttggtatcagcagaagcccggccaggcccctcggctgctgatctccggcgcctcttctagagccaccggcatccctgaccggttctccggctctggctccggcaccgacttcaccctgaccatcagccggctggaacccgaggacttcgccgtgtactattgccagcagtacggcaagtcccccatcaccttcggccagggaacccggctggaaatgaag

SEQ ID NO: 1007 - protein, 245 aa, artificial
  VH-VL of CDH19 17H8.2
QVQLQESGPGLVKPSETLSLTCTVSGGSINSYYWSWIRQPPGKGLEWIGYIYYIGSTNYNPSLKSRVTISVDTSKNQFSLKLSSVTAADTALYYCARDSRYRSGWYDAFDIWGQGTMVTVSSGGGGSGGGGSGGGGSDIVLTQSPGTLSLSPGERATLSCRASQSVAGSYLAWYQQKPGQAPRLLISGASSRATGIPDRFSGSGSGTDFTLTISRLEPEDFAVYYCQQYGKSPITFGQGTRLEMK

SEQ ID NO: 1008 - protein, 506 aa, artificial
  CDH19 17H8.2 x I2C
QVQLQESGPGLVKPSETLSLTCTVSGGSINSYYWSWIRQPPGKGLEWIGYIYYIGSTNYNPSLKSRVTISVDTSKNQFSLKLSSVTAADTALYYCARDSRYRSGWYDAFDIWGQGTMVTVSSGGGGSGGGGSGGGGSDIVLTQSPGTLSLSPGERATLSCRASQSVAGSYLAWYQQKPGQAPRLLISGASSRATGIPDRFSGSGSGTDFTLTISRLEPEDFAVYYCQQYGKSPITFGQGTRLEMKSGGGGSEVQLVESGGGLVQPGGSLKLSCAASGFTFNKYAMNWVRQAPGKGLEWVARIRSKYNNYATYYADSVKDRFTISRDDSKNTAYLQMNNLKTEDTAVYYCVRHGNFGNSYISYWAYWGQGTLVTVSSGGGGSGGGGSGGGGSQTVVTQEPSLTVSPGGTVTLTCGSSTGAVTSGNYPNWVQQKPGQAPRGLIGGTKFLAPGTPARFSGSLLGGKAALTLSGVQPEDEAEYYCVLWYSNRWVFGGGTKLTVLHHHHHH

SEQ ID NO: 1009 - protein, 5 aa, artificial
  CDR-H1 of CDH19 19B5.1
SYFIH

SEQ ID NO: 1010 - protein, 17 aa, artificial
  CDR-H2 of CDH19 19B5.1
IINPISVSTSYAQKFQG

SEQ ID NO: 1011 - protein, 11 aa, artificial
  CDR-H3 of CDH19 19B5.1
GGIQLWLHLDY

SEQ ID NO: 1012 - protein, 13 aa, artificial
  CDR-L1 of CDH19 19B5.1
SGSRSNIGSNFVN

SEQ ID NO: 1013 - protein, 7 aa, artificial
  CDR-L2 of CDH19 19B5.1
TNNQRPS

SEQ ID NO: 1014 - protein, 11 aa, artificial
  CDR-L3 of CDH19 19B5.1
ATWDDSMNGWV

SEQ ID NO: 1015 - DNA, 360 bp, artificial
  VH of CDH19 19B5.1
caggtgcagctggtgcagtctggcgccgaagtgaagaaacctggcgcctccgtgaaggtgtcctgcaaggtgtccggctacaccttcaccagctacttcatccactgggtccgacaggccccaggccagggcctggaatggatgggcatcatcaaccctatctccgtgtccacctcctacgcccagaaattccagggcagagtgaccatgacccgggacacctccacctccaccgtgttcatggaactgtcctccctgcggagcgaggacaccgccgtgtactactgcgccagaggcggcatccagctgtggctgcacctggactattggggccagggcaccctggtcaccgtgtcctct

SEQ ID NO: 1016 - protein, 120 aa, artificial; identical to SEQ ID NO: 368
  VH of CDH19 19B5.1

SEQ ID NO: 1017 - DNA, 330 bp, artificial
  VL of CDH19 19B5.1
cagtctgccctgacccagcctccctccaccaccggcacacctggccagcgcgtgaccatctcctgctccggctcccggtccaacatcggctccaacttcgtgaactggtacaagcagctgcccggcaccgcccccaaggtgctgatctacaccaacaaccagcggccctccggcgtgcccgaccggttctctggctccaagtctggcacctccgcctccctggccatctccggcctgcagtccgaggacgagtccgactactactgtgccacctgggacgactccatgaacggctgggtgttcggcggaggcaccaagctgaccgtgctg

SEQ ID NO: 1018 - protein, 110 aa, artificial
  VL of CDH19 19B5.1
QSALTQPPSTTGTPGQRVTISCSGSRSNIGSNFVNWYKQLPGTAPKVLIYTNNQRPSGVPDRFSGSKSGTSASLAISGLQSEDESDYYCATWDDSMNGWVFGGGTKLTVL

SEQ ID NO: 1019 - DNA, 735 bp, artificial
  VH-VL of CDH19 19B5.1
caggtgcagctggtgcagtctggcgccgaagtgaagaaacctggcgcctccgtgaaggtgtcctgcaaggtgtccggctacaccttcaccagctacttcatccactgggtccgacaggccccaggccagggcctggaatggatgggcatcatcaaccctatctccgtgtccacctcctacgcccagaaattccagggcagagtgaccatgacccgggacacctccacctccaccgtgttcatggaactgtcctccctgcggagcgaggacaccgccgtgtactactgcgccagaggcggcatccagctgtggctgcacctggactattggggccagggcaccctggtcaccgtgtcctctggtggcggaggatctggcggaggtggaagcggaggcggcggatctcagtctgccctgacccagcctccctccaccaccggcacacctggccagcgcgtgaccatctcctgctccggctcccggtccaacatcggctccaacttcgtgaactggtacaagcagctgcccggcaccgcccccaaggtgctgatctacaccaacaaccagcggccctccggcgtgcccgaccggttctctggctccaagtctggcacctccgcctccctggccatctccggcctgcagtccgaggacgagtccgactactactgtgccacctgggacgactccatgaacggctgggtgttcggcggaggcaccaagctgaccgtgctg

SEQ ID NO: 1020 - protein, 245 aa, artificial
  VH-VL of CDH19 19B5.1
QVQLVQSGAEVKKPGASVKVSCKVSGYTFTSYFIHWVRQAPGQGLEWMGIINPISVSTSYAQKFQGRVTMTRDTSTSTVFMELSSLRSEDTAVYYCARGGIQLWLHLDYWGQGTLVTVSSGGGGSGGGGSGGGGSQSALTQPPSTTGTPGQRVTISCSGSRSNIGSNFVNWYKQLPGTAPKVLIYTNNQRPSGVPDRFSGSKSGTSASLAISGLQSEDESDYYCATWDDSMNGWVFGGGTKLTVL

SEQ ID NO: 1021 - protein, 506 aa, artificial
  CDH19 19B5.1 x I2C
QVQLVQSGAEVKKPGASVKVSCKVSGYTFTSYFIHWVRQAPGQGLEWMGIINPISVSTSYAQKFQGRVTMTRDTSTSTVFMELSSLRSEDTAVYYCARGGIQLWLHLDYWGQGTLVTVSSGGGGSGGGGSGGGGSQSALTQPPSTTGTPGQRVTISCSGSRSNIGSNFVNWYKQLPGTAPKVLIYTNNQRPSGVPDRFSGSKSGTSASLAISGLQSEDESDYYCATWDDSMNGWVFGGGTKLTVLSGGGGSEVQLVESGGGLVQPGGSLKLSCAASGFTFNKYAMNWVRQAPGKGLEWVARIRSKYNNYATYYADSVKDRFTISRDDSKNTAYLQMNNLKTEDTAVYYCVRHGNFGNSYISYWAYWGQGTLVTVSSGGGGSGGGGSGGGGSQTVVTQEPSLTVSPGGTVTLTCGSSTGAVTSGNYPNWVQQKPGQAPRGLIGGTKFLAPGTPARFSGSLLGGKAALTLSGVQPEDEAEYYCVLWYSNRWVFGGGTKLTVLHHHHHH

SEQ ID NO: 1022 - protein, 5 aa, artificial
  CDR-H1 of CDH19 20D3.1
SYFIH

SEQ ID NO: 1023 - protein, 17 aa, artificial
  CDR-H2 of CDH19 20D3.1
IINPISVSTSYAQKFQG

SEQ ID NO: 1024 - protein, 11 aa, artificial
  CDR-H3 of CDH19 20D3.1
GGIQLWLHFDY

SEQ ID NO: 1025 - protein, 13 aa, artificial
  CDR-L1 of CDH19 20D3.1
SGSSSNIGSNFVN

SEQ ID NO: 1026 - protein, 7 aa, artificial
  CDR-L2 of CDH19 20D3.1
TNNQRPS

SEQ ID NO: 1027 - protein, 11 aa, artificial
  CDR-L3 of CDH19 20D3.1
ATWDDSLNGWV

SEQ ID NO: 1028 - DNA, 360 bp, artificial
  VH of CDH19 20D3.1
caggtgcagctggtgcagtctggcgccgaagtgaagaaacctggcgcctccgtgaaggtgtcctgcaaggtgtccggctacaccttcaccagctacttcatccactgggtccgacaggccccaggccagggcctggaatggatgggcatcatcaaccctatctccgtgtccacctcctacgcccagaaattccagggcagagtgaccatgacccgggacacctccacctccaccgtgttcatggaactgtcctccctgcggagcgaggacaccgccgtgtactactgcgccagaggcggcatccagctgtggctgcacttcgactactggggccagggcaccctggtcaccgtgtctagc

SEQ ID NO: 1029 - protein, 120 aa, artificial; identical to SEQ ID NO: 342
  VH of CDH19 20D3.1

SEQ ID NO: 1030 - DNA, 330 bp, artificial
  VL of CDH19  20D3.1
cagtctgccctgacccagcctccttctgccaccggcacccctggccagcgcgtgaccatctcctgctccggctcctcctccaacatcggctccaacttcgtgaactggtacaagcagctgcccggcaccgcccccaaggtgctgatctacaccaacaaccagcggccctccggcgtgcccgaccggttctctggctccaagtctggcacctccgcctccctggccatctccggcctgcagtccgaggacgagtccgactactactgtgccacctgggacgactccctgaacggctgggtgttcggcggaggcaccaagctgaccgtgctg

SEQ ID NO: 1031 - protein, 110 aa, artificial
  VL of CDH19  20D3.1
QSALTQPPSATGTPGQRVTISCSGSSSNIGSNFVNWYKQLPGTAPKVLIYTNNQRPSGVPDRFSGSKSGTSASLAISGLQSEDESDYYCATWDDSLNGWVFGGGTKLTVL

SEQ ID NO: 1032 - DNA, 735 bp, artificial
  VH-VL of CDH19 20D3.1
caggtgcagctggtgcagtctggcgccgaagtgaagaaacctggcgcctccgtgaaggtgtcctgcaaggtgtccggctacaccttcaccagctacttcatccactgggtccgacaggccccaggccagggcctggaatggatgggcatcatcaaccctatctccgtgtccacctcctacgcccagaaattccagggcagagtgaccatgacccgggacacctccacctccaccgtgttcatggaactgtcctccctgcggagcgaggacaccgccgtgtactactgcgccagaggcggcatccagctgtggctgcacttcgactactggggccagggcaccctggtcaccgtgtctagcggaggcggaggatctggtggcggtggttctggcggcggaggctctcagtctgccctgacccagcctccttctgccaccggcacccctggccagcgcgtgaccatctcctgctccggctcctcctccaacatcggctccaacttcgtgaactggtacaagcagctgcccggcaccgcccccaaggtgctgatctacaccaacaaccagcggccctccggcgtgcccgaccggttctctggctccaagtctggcacctccgcctccctggccatctccggcctgcagtccgaggacgagtccgactactactgtgccacctgggacgactccctgaacggctgggtgttcggcggaggcaccaagctgaccgtgctg

SEQ ID NO: 1033 - protein, 245 aa, artificial
  VH-VL of CDH19 20D3.1
QVQLVQSGAEVKKPGASVKVSCKVSGYTFTSYFIHWVRQAPGQGLEWMGIINPISVSTSYAQKFQGRVTMTRDTSTSTVFMELSSLRSEDTAVYYCARGGIQLWLHFDYWGQGTLVTVSSGGGGSGGGGSGGGGSQSALTQPPSATGTPGQRVTISCSGSSSNIGSNFVNWYKQLPGTAPKVLIYTNNQRPSGVPDRFSGSKSGTSASLAISGLQSEDESDYYCATWDDSLNGWVFGGGTKLTVL

SEQ ID NO: 1034 - protein, 506 aa, artificial
  CDH19 20D3.1 x I2C
QVQLVQSGAEVKKPGASVKVSCKVSGYTFTSYFIHWVRQAPGQGLEWMGIINPISVSTSYAQKFQGRVTMTRDTSTSTVFMELSSLRSEDTAVYYCARGGIQLWLHFDYWGQGTLVTVSSGGGGSGGGGSGGGGSQSALTQPPSATGTPGQRVTISCSGSSSNIGSNFVNWYKQLPGTAPKVLIYTNNQRPSGVPDRFSGSKSGTSASLAISGLQSEDESDYYCATWDDSLNGWVFGGGTKLTVLSGGGGSEVQLVESGGGLVQPGGSLKLSCAASGFTFNKYAMNWVRQAPGKGLEWVARIRSKYNNYATYYADSVKDRFTISRDDSKNTAYLQMNNLKTEDTAVYYCVRHGNFGNSYISYWAYWGQGTLVTVSSGGGGSGGGGSGGGGSQTVVTQEPSLTVSPGGTVTLTCGSSTGAVTSGNYPNWVQQKPGQAPRGLIGGTKFLAPGTPARFSGSLLGGKAALTLSGVQPEDEAEYYCVLWYSNRWVFGGGTKLTVLHHHHHH

SEQ ID NO: 1035 - protein, 5 aa, artificial
  CDR-H1 of CDH19 22D1.1
SYFIH

SEQ ID NO: 1036 - protein, 17 aa, artificial
  CDR-H2 of CDH19 22D1.1
IINPISVSTSYAQKFQG

SEQ ID NO: 1037 - protein, 11 aa, artificial
  CDR-H3 of CDH19 22D1.1
GGIQLWLHLDY

SEQ ID NO: 1038 - protein, 13 aa, artificial
  CDR-L1 of CDH19 22D1.1
SGSSSNIGSNFVN

SEQ ID NO: 1039 - protein, 7 aa, artificial
  CDR-L2 of CDH19 22D1.1
TNNQRPS

SEQ ID NO: 1040 - protein, 11 aa, artificial
  CDR-L3 of CDH19 22D1.1
ATWDDSMNGWV

SEQ ID NO: 1041 - DNA, 360 bp, artificial
  VH of CDH19 22D1.1
caggtgcagctggtgcagtctggcgccgaagtgaagaaacctggcgcctccgtgcgggtgtcctgcaaggtgtccggctacaccttcaccagctacttcatccactgggtccgacaggccccaggccagggcctggaatggatgggcatcatcaaccctatctccgtgtccacctcctacgcccagaaattccagggcagagtgaccatgacccgggacacctccacctccaccgtgttcatggaactgtcctccctgcggagcgaggacaccgccgtgtactactgcgccagaggcggcatccagctgtggctgcacctggactattggggccagggcaccctggtcaccgtgtcctct

SEQ ID NO: 1042 - protein, 120 aa, artificial; identical to SEQ ID NO: 366
  VH of CDH19 22D1.1

SEQ ID NO: 1043 - DNA, 330 bp, artificial
  VL of CDH19 22D1.1
cagtctgccctgacccagcctccttccgctaccggcacccctggccagcgcgtgaccatctcctgctccggctcctcctccaacatcggctccaacttcgtgaactggtacaagcagctgcccggcaccgcccccaaggtgctgatctacaccaacaaccagcggccctccggcgtgcccgaccggttctctggctccaagtctggcacctccgcctccctggccatctccggcctgcagtccgaggacgagtccgactactactgtgccacctgggacgactccatgaacggctgggtgttcggcggaggcaccaagctgaccgtgctg

SEQ ID NO: 1044 - protein, 110 aa, artificial
  VL of CDH19 22D1.1
QSALTQPPSATGTPGQRVTISCSGSSSNIGSNFVNWYKQLPGTAPKVLIYTNNQRPSGVPDRFSGSKSGTSASLAISGLQSEDESDYYCATWDDSMNGWVFGGGTKLTVL

SEQ ID NO: 1045 - DNA, 735 bp, artificial
  VH-VL of CDH19 22D1.1
caggtgcagctggtgcagtctggcgccgaagtgaagaaacctggcgcctccgtgcgggtgtcctgcaaggtgtccggctacaccttcaccagctacttcatccactgggtccgacaggccccaggccagggcctggaatggatgggcatcatcaaccctatctccgtgtccacctcctacgcccagaaattccagggcagagtgaccatgacccgggacacctccacctccaccgtgttcatggaactgtcctccctgcggagcgaggacaccgccgtgtactactgcgccagaggcggcatccagctgtggctgcacctggactattggggccagggcaccctggtcaccgtgtcctctggtggcggaggatctggcggaggtggaagcggaggcggcggatctcagtctgccctgacccagcctccttccgctaccggcacccctggccagcgcgtgaccatctcctgctccggctcctcctccaacatcggctccaacttcgtgaactggtacaagcagctgcccggcaccgcccccaaggtgctgatctacaccaacaaccagcggccctccggcgtgcccgaccggttctctggctccaagtctggcacctccgcctccctggccatctccggcctgcagtccgaggacgagtccgactactactgtgccacctgggacgactccatgaacggctgggtgttcggcggaggcaccaagctgaccgtgctg

SEQ ID NO: 1046 - protein, 245 aa, artificial
  VH-VL of CDH19 22D1.1
QVQLVQSGAEVKKPGASVRVSCKVSGYTFTSYFIHWVRQAPGQGLEWMGIINPISVSTSYAQKFQGRVTMTRDTSTSTVFMELSSLRSEDTAVYYCARGGIQLWLHLDYWGQGTLVTVSSGGGGSGGGGSGGGGSQSALTQPPSATGTPGQRVTISCSGSSSNIGSNFVNWYKQLPGTAPKVLIYTNNQRPSGVPDRFSGSKSGTSASLAISGLQSEDESDYYCATWDDSMNGWVFGGGTKLTVL

SEQ ID NO: 1047 - protein, 506 aa, artificial
  CDH19 22D1.1 x I2C
QVQLVQSGAEVKKPGASVRVSCKVSGYTFTSYFIHWVRQAPGQGLEWMGIINPISVSTSYAQKFQGRVTMTRDTSTSTVFMELSSLRSEDTAVYYCARGGIQLWLHLDYWGQGTLVTVSSGGGGSGGGGSGGGGSQSALTQPPSATGTPGQRVTISCSGSSSNIGSNFVNWYKQLPGTAPKVLIYTNNQRPSGVPDRFSGSKSGTSASLAISGLQSEDESDYYCATWDDSMNGWVFGGGTKLTVLSGGGGSEVQLVESGGGLVQPGGSLKLSCAASGFTFNKYAMNWVRQAPGKGLEWVARIRSKYNNYATYYADSVKDRFTISRDDSKNTAYLQMNNLKTEDTAVYYCVRHGNFGNSYISYWAYWGQGTLVTVSSGGGGSGGGGSGGGGSQTVVTQEPSLTVSPGGTVTLTCGSSTGAVTSGNYPNWVQQKPGQAPRGLIGGTKFLAPGTPARFSGSLLGGKAALTLSGVQPEDEAEYYCVLWYSNRWVFGGGTKLTVLHHHHHH

SEQ ID NO: 1048 - protein, 5 aa, artificial
  CDR-H1 of CDH19 22G10.1
SYAMN

SEQ ID NO: 1049 - protein, 17 aa, artificial
  CDR-H2 of CDH19 22G10.1
TISGGGANTYYADSVKG

SEQ ID NO: 1050 - protein, 12 aa, artificial
  CDR-H3 of CDH19 22G10.1
GGMGGYYYGMDV

SEQ ID NO: 1051 - protein, 11 aa, artificial
  CDR-L1 of CDH19 22G10.1
RASQSISSNLA

SEQ ID NO: 1052 - protein, 7 aa, artificial
  CDR-L2 of CDH19 22G10.1
GAFTRAT

SEQ ID NO: 1053 - protein, 9 aa, artificial
  CDR-L3 of CDH19 22G10.1
QQYNYWPLT

SEQ ID NO: 1054 - DNA, 363 bp, artificial
  VH of CDH19 22G10.1
gaggtgcagctgctggaatccggcggaggactggtgcagcctggcggctccctgagactgtcttgcgccgcctccggcttcaccttctccagctacgccatgaactgggtccgacaggcccctggcaagggcctggaatgggtgtccaccatcagcggcggaggcgccaacacctactacgccgactccgtgaagggccggttcaccatctcctccgacaactccaagtccaccctgtacctgcagatgaactccctgagagccgccgacaccgccgtgtaccactgtgctaagggcggcatgggcggctactactacggcatggatgtgtggggccagggcaccaccgtgaccgtgtctagc

SEQ ID NO: 1055 - protein, 121 aa, artificial; identical to SEQ ID NO: 378
  VH of CDH19 22G10.1

SEQ ID NO: 1056 - DNA, 321 bp, artificial
  VL of CDH19 22G10.1
gagatcgtgatgacccagtcccccgtgaccctgtccctgagcctgggcgagagagccaccctgtcttgccgggcctcccagtccatctccagcaacctggcctggttccagcagaagcccggccaggcccctcggctgctgatctacggcgcctttacccgggccaccggcatccctgccagagtgtctggctccggctccggcaccgagttcaccctgaccatcagctccctgcagtccgaggactttgccgtgtactactgccagcagtacaactactggcccctgaccttcggaggcggcaccaaggtggaaatcaag

SEQ ID NO: 1057 - protein, 107 aa, artificial
  VL of CDH19 22G10.1
EIVMTQSPVTLSLSLGERATLSCRASQSISSNLAWFQQKPGQAPRLLIYGAFTRATGIPARVSGSGSGTEFTLTISSLQSEDFAVYYCQQYNYWPLTFGGGTKVEIK

SEQ ID NO: 1058 - DNA, 729 bp, artificial
  VH-VL of CDH19 22G10.1
gaggtgcagctgctggaatccggcggaggactggtgcagcctggcggctccctgagactgtcttgcgccgcctccggcttcaccttctccagctacgccatgaactgggtccgacaggcccctggcaagggcctggaatgggtgtccaccatcagcggcggaggcgccaacacctactacgccgactccgtgaagggccggttcaccatctcctccgacaactccaagtccaccctgtacctgcagatgaactccctgagagccgccgacaccgccgtgtaccactgtgctaagggcggcatgggcggctactactacggcatggatgtgtggggccagggcaccaccgtgaccgtgtctagcggaggcggaggatctggcggtggtggttctggcggaggcggctccgagatcgtgatgacccagtcccccgtgaccctgtccctgagcctgggcgagagagccaccctgtcttgccgggcctcccagtccatctccagcaacctggcctggttccagcagaagcccggccaggcccctcggctgctgatctacggcgcctttacccgggccaccggcatccctgccagagtgtctggctccggctccggcaccgagttcaccctgaccatcagctccctgcagtccgaggactttgccgtgtactactgccagcagtacaactactggcccctgaccttcggaggcggcaccaaggtggaaatcaag

SEQ ID NO: 1059 - protein, 243 aa, artificial
  VH-VL of CDH19 22G10.1
EVQLLESGGGLVQPGGSLRLSCAASGFTFSSYAMNWVRQAPGKGLEWVSTISGGGANTYYADSVKGRFTISSDNSKSTLYLQMNSLRAADTAVYHCAKGGMGGYYYGMDVWGQGTTVTVSSGGGGSGGGGSGGGGSEIVMTQSPVTLSLSLGERATLSCRASQSISSNLAWFQQKPGQAPRLLIYGAFTRATGIPARVSGSGSGTEFTLTISSLQSEDFAVYYCQQYNYWPLTFGGGTKVEIK

SEQ ID NO: 1060 - protein, 504 aa, artificial
  CDH19 22G10.1 x I2C
EVQLLESGGGLVQPGGSLRLSCAASGFTFSSYAMNWVRQAPGKGLEWVSTISGGGANTYYADSVKGRFTISSDNSKSTLYLQMNSLRAADTAVYHCAKGGMGGYYYGMDVWGQGTTVTVSSGGGGSGGGGSGGGGSEIVMTQSPVTLSLSLGERATLSCRASQSISSNLAWFQQKPGQAPRLLIYGAFTRATGIPARVSGSGSGTEFTLTISSLQSEDFAVYYCQQYNYWPLTFGGGTKVEIKSGGGGSEVQLVESGGGLVQPGGSLKLSCAASGFTFNKYAMNWVRQAPGKGLEWVARIRSKYNNYATYYADSVKDRFTISRDDSKNTAYLQMNNLKTEDTAVYYCVRHGNFGNSYISYWAYWGQGTLVTVSSGGGGSGGGGSGGGGSQTVVTQEPSLTVSPGGTVTLTCGSSTGAVTSGNYPNWVQQKPGQAPRGLIGGTKFLAPGTPARFSGSLLGGKAALTLSGVQPEDEAEYYCVLWYSNRWVFGGGTKLTVLHHHHHH

SEQ ID NO: 1061 - protein, 5 aa, artificial
  CDR-H1 of CDH19 23A10.3
RYGIH

SEQ ID NO: 1062 - protein, 17 aa, artificial
  CDR-H2 of CDH19 23A10.3
VIWYDGSNKYYADSVKG

SEQ ID NO: 1063 - protein, 16 aa, artificial
  CDR-H3 of CDH19 23A10.3
RAGIPGTTGYYYGMDV

SEQ ID NO: 1064 - protein, 11 aa, artificial
  CDR-L1 of CDH19 23A10.3
SGDRLGEKYVC

SEQ ID NO: 1065 - protein, 7 aa, artificial
  CDR-L2 of CDH19 23A10.3
QDNKWPS

SEQ ID NO: 1066 - protein, 9 aa, artificial
  CDR-L3 of CDH19 23A10.3
QAWDSSTVV

SEQ ID NO: 1067 - protein, 375 aa, artificial
  VH of CDH19 23A10.3
CAGGTGCAGCTGGTGGAATCCGGCGGAGGCGTGGTGCAGCCTGGCCGGTCCCTGAGACTGTCTTGCGCCGCCTCCGGCTTCACCTTCTCCAGATACGGCATCCACTGGGTCCGACAGGCCCCTGGCAAGGGCCTGGAATGGGTGGCCGTGATTTGGTACGACGGCTCCAACAAGTACTACGCCGACTCCGTGAAGGGCCGGTTCACCATCTCCCGGGACAACTCCAAGAACACCCTGTACCTGCTGATGAACTCCCTGCGGGCCGAGGACTCCGCCGTGTACTACTGTGCCAGAAGGGCCGGCATCCCCGGCACCACCGGCTACTACTACGGCATGGATGTGTGGGGCCAGGGCACCACCGTGACCGTGTCTAGC

SEQ ID NO: 1068 - protein, 125 aa, artificial; identical to SEQ ID NO: 390
  VH of CDH19 23A10.3

SEQ ID NO: 1069 - DNA, 315 bp, artificial
  VL of CDH19 23A10.3
tacgagctgacccagcccccctccgtgtccgtgtctcctggccagaccgcctccatcacctgttctggcgaccggctgggcgagaaatacgtgtgctggtatcagcagaagcccggccagtcccccatcctggtcatctaccaggacaacaagtggccctccggcatccctgagcggttctccggctccaactccggcaacaccgccaccctgaccatctccggcacccaggccatggacgaggccgactactactgccaggcctgggactcctccaccgtggtgttcggcggaggcaccaagctgaccgtgctg

SEQ ID NO: 1070 - protein, 106 aa, artificial
  VL of CDH19 23A10.3
SYELTQPPSVSVSPGQTASITCSGDRLGEKYVCWYQQKPGQSPILVIYQDNKWPSGIPERFSGSNSGNTATLTISGTQAMDEADYYCQAWDSSTVVFGGGTKLTVL

SEQ ID NO: 1071 - DNA, 738 bp, artificial
  VH-VL of CDH19 23A10.3
caggtgcagctggtggaatccggcggaggcgtggtgcagcctggccggtccctgagactgtcttgcgccgcctccggcttcaccttctccagatacggcatccactgggtccgacaggcccctggcaagggcctggaatgggtggccgtgatttggtacgacggctccaacaagtactacgccgactccgtgaagggccggttcaccatctcccgggacaactccaagaacaccctgtacctgctgatgaactccctgcgggccgaggactccgccgtgtactactgtgccagaagggccggcatccccggcaccaccggctactactacggcatggatgtgtggggccagggcaccaccgtgaccgtgtctagcggaggcggaggatctggtggcggtggttctggcggcggaggctcctcttacgagctgacccagcccccctccgtgtccgtgtctcctggccagaccgcctccatcacctgttctggcgaccggctgggcgagaaatacgtgtgctggtatcagcagaagcccggccagtcccccatcctggtcatctaccaggacaacaagtggccctccggcatccctgagcggttctccggctccaactccggcaacaccgccaccctgaccatctccggcacccaggccatggacgaggccgactactactgccaggcctgggactcctccaccgtggtgttcggcggaggcaccaagctgaccgtgctg

SEQ ID NO: 1072 - protein, 246 aa, artificial
  VH-VL of CDH19 23A10.3
QVQLVESGGGVVQPGRSLRLSCAASGFTFSRYGIHWVRQAPGKGLEWVAVIWYDGSNKYYADSVKGRFTISRDNSKNTLYLLMNSLRAEDSAVYYCARRAGIPGTTGYYYGMDVWGQGTTVTVSSGGGGSGGGGSGGGGSSYELTQPPSVSVSPGQTASITCSGDRLGEKYVCWYQQKPGQSPILVIYQDNKWPSGIPERFSGSNSGNTATLTISGTQAMDEADYYCQAWDSSTVVFGGGTKLTVL

SEQ ID NO: 1073 - protein, 507 aa, artificial
  CDH19 23A10.3 x I2C
QVQLVESGGGVVQPGRSLRLSCAASGFTFSRYGIHWVRQAPGKGLEWVAVIWYDGSNKYYADSVKGRFTISRDNSKNTLYLLMNSLRAEDSAVYYCARRAGIPGTTGYYYGMDVWGQGTTVTVSSGGGGSGGGGSGGGGSSYELTQPPSVSVSPGQTASITCSGDRLGEKYVCWYQQKPGQSPILVIYQDNKWPSGIPERFSGSNSGNTATLTISGTQAMDEADYYCQAWDSSTVVFGGGTKLTVLSGGGGSEVQLVESGGGLVQPGGSLKLSCAASGFTFNKYAMNWVRQAPGKGLEWVARIRSKYNNYATYYADSVKDRFTISRDDSKNTAYLQMNNLKTEDTAVYYCVRHGNFGNSYISYWAYWGQGTLVTVSSGGGGSGGGGSGGGGSQTVVTQEPSLTVSPGGTVTLTCGSSTGAVTSGNYPNWVQQKPGQAPRGLIGGTKFLAPGTPARFSGSLLGGKAALTLSGVQPEDEAEYYCVLWYSNRWVFGGGTKLTVLHHHHHH

SEQ ID NO: 1074 - protein, 5 aa, artificial
  CDR-H1 of CDH19 25F8.1
SYYIH

SEQ ID NO: 1075 - protein, 17 aa, artificial
  CDR-H2 of CDH19 25F8.1
IINPSGGSTRYAQKFQG

SEQ ID NO: 1076 - protein, 11 aa, artificial
  CDR-H3 of CDH19 25F8.1
GGIQLWLHFDY

SEQ ID NO: 1077 - protein, 13 aa, artificial
  CDR-L1 of CDH19 25F8.1
SGSSSNIGRNFVN

SEQ ID NO: 1078 - protein, 7 aa, artificial
  CDR-L2 of CDH19 25F8.1
TNNQRPS

SEQ ID NO: 1079 - protein, 11 aa, artificial
  CDR-L3 of CDH19 25F8.1
AAWDDSLNGWV

SEQ ID NO: 1080 - DNA, 360 bp, artificial
  VH of CDH19 25F8.1
caggtgcagctggtgcagtctggcgccgaagtgaagaaacctggcgcctccgtgaaggtgtcctgcaaggcctccggctacaccttcaccagctactacatccactgggtccgacaggccccaggccagggcctggaatggatgggcatcatcaacccctccggcggctccaccagatacgcccagaaattccagggcagagtgaccatgacccgggacacctccacctccaccgtgttcatggaactgtcctccctgcggagcgaggacaccgccgtgtactactgcgccagaggcggcatccagctgtggctgcacttcgactactggggccagggcaccctggtcaccgtgtctagc

SEQ ID NO: 1081 - protein, 120 aa, artificial; identical to SEQ ID NO: 370
  VH of CDH19 25F8.1

SEQ ID NO: 1082 - DNA, 330 bp, artificial
  VL of CDH19 25F8.1
cagtctgccctgacccagcctccttctgccaccggcacccctggccagcgcgtgaccatctcctgctccggctcctcctccaacatcggccggaacttcgtgaactggtacaagcagctgcccggcaccgcccccaaggtgctgatctacaccaacaaccagcggccctccggcgtgcccgaccggttctctggctccaagtctggcacctccgcctccctggccatctccggcctgcagtccgaggacgagtccgactactactgtgccgcctgggacgactccctgaacggctgggtgttcggcggaggcaccaagctgaccgtgctg

SEQ ID NO: 1083 - protein, 110 aa, artificial
  VL of CDH19 25F8.1
QSALTQPPSATGTPGQRVTISCSGSSSNIGRNFVNWYKQLPGTAPKVLIYTNNQRPSGVPDRFSGSKSGTSASLAISGLQSEDESDYYCAAWDDSLNGWVFGGGTKLTVL

SEQ ID NO: 1084 - DNA, 735 bp, artificial
  VH-VL of CDH19 25F8.1
caggtgcagctggtgcagtctggcgccgaagtgaagaaacctggcgcctccgtgaaggtgtcctgcaaggcctccggctacaccttcaccagctactacatccactgggtccgacaggccccaggccagggcctggaatggatgggcatcatcaacccctccggcggctccaccagatacgcccagaaattccagggcagagtgaccatgacccgggacacctccacctccaccgtgttcatggaactgtcctccctgcggagcgaggacaccgccgtgtactactgcgccagaggcggcatccagctgtggctgcacttcgactactggggccagggcaccctggtcaccgtgtctagcggaggcggaggatctggtggcggtggttctggcggcggaggctctcagtctgccctgacccagcctccttctgccaccggcacccctggccagcgcgtgaccatctcctgctccggctcctcctccaacatcggccggaacttcgtgaactggtacaagcagctgcccggcaccgcccccaaggtgctgatctacaccaacaaccagcggccctccggcgtgcccgaccggttctctggctccaagtctggcacctccgcctccctggccatctccggcctgcagtccgaggacgagtccgactactactgtgccgcctgggacgactccctgaacggctgggtgttcggcggaggcaccaagctgaccgtgctg

SEQ ID NO: 1085 - protein, 245 aa, artificial
  VH-VL of CDH19 25F8.1
QVQLVQSGAEVKKPGASVKVSCKASGYTFTSYYIHWVRQAPGQGLEWMGIINPSGGSTRYAQKFQGRVTMTRDTSTSTVFMELSSLRSEDTAVYYCARGGIQLWLHFDYWGQGTLVTVSSGGGGSGGGGSGGGGSQSALTQPPSATGTPGQRVTISCSGSSSNIGRNFVNWYKQLPGTAPKVLIYTNNQRPSGVPDRFSGSKSGTSASLAISGLQSEDESDYYCAAWDDSLNGWVFGGGTKLTVL

SEQ ID NO: 1086 - protein, 506 aa, artificial
  CDH19 25F8.1 x I2C
QVQLVQSGAEVKKPGASVKVSCKASGYTFTSYYIHWVRQAPGQGLEWMGIINPSGGSTRYAQKFQGRVTMTRDTSTSTVFMELSSLRSEDTAVYYCARGGIQLWLHFDYWGQGTLVTVSSGGGGSGGGGSGGGGSQSALTQPPSATGTPGQRVTISCSGSSSNIGRNFVNWYKQLPGTAPKVLIYTNNQRPSGVPDRFSGSKSGTSASLAISGLQSEDESDYYCAAWDDSLNGWVFGGGTKLTVLSGGGGSEVQLVESGGGLVQPGGSLKLSCAASGFTFNKYAMNWVRQAPGKGLEWVARIRSKYNNYATYYADSVKDRFTISRDDSKNTAYLQMNNLKTEDTAVYYCVRHGNFGNSYISYWAYWGQGTLVTVSSGGGGSGGGGSGGGGSQTVVTQEPSLTVSPGGTVTLTCGSSTGAVTSGNYPNWVQQKPGQAPRGLIGGTKFLAPGTPARFSGSLLGGKAALTLSGVQPEDEAEYYCVLWYSNRWVFGGGTKLTVLHHHHHH

SEQ ID NO: 1087 - protein, 5 aa, artificial
  CDR-H1 of CDH19 25G10.1
GYYWS

SEQ ID NO: 1088 - protein, 16 aa, artificial
  CDR-H2 of CDH19 25G10.1
YIYYIGSTNYNPSLKS

SEQ ID NO: 1089 - protein, 12 aa, artificial
  CDR-H3 of CDH19 25G10.1
DGSSGWYRWFDP

SEQ ID NO: 1090 - protein, 12 aa, artificial
  CDR-L1 of CDH19 25G10.1
RASQSVSSSYLA

SEQ ID NO: 1091 - protein, 7 aa, artificial
  CDR-L2 of CDH19 25G10.1
GASSRAT

SEQ ID NO: 1092 - protein, 9 aa, artificial
  CDR-L3 of CDH19 25G10.1
QQYGNSPLT

SEQ ID NO: 1093 - DNA, 360 bp, artificial
  VH of CDH19 25G10.1
caggtgcagctgcaggaatccggccctggcctggtcaagccctccgagacactgtccctgacctgcaccgtgtccggcggctccatctccggctactactggtcctggatccggcagccccctggcaagggcctggaatggatcggctacatctactacatcggctccaccaactacaaccccagcctgaagtccagagtgaccatgtccgtggacacctccaagaaccagttctccctgaagctgtcctccgtgaccgccgctgacaccgccgtgtactactgcgccagagatggctcctccggctggtatcgttggttcgacccttggggccagggcaccctggtcaccgtgtctagc

SEQ ID NO: 1094 - protein, 120 aa, artificial; identical to SEQ ID NO: 461
  VH of CDH19 25G10.1

SEQ ID NO: 1095 - DNA, 324 bp, artificial
  VL of CDH19 25G10.1
gagatcgtgctgacccagtcccctggcaccctgtccctgagccctggcgagagagccaccctgtcctgcagagcctcccagtccgtgtcctcctcctacctggcttggtatcagcagaagcccggccaggcccctcggctgctgatcttcggcgcctcttccagagccaccggcatccctgaccggttctccggctctggctccggcaccgacttcaccctgaccatctcccggctggaacccgaggacttcgctgtgtaccactgccagcagtacggcaacagccccctgaccttcggcggaggcaccaaggtggaaatcaag

SEQ ID NO: 1096 - protein, 108 aa, artificial
  VL of CDH19 25G10.1
EIVLTQSPGTLSLSPGERATLSCRASQSVSSSYLAWYQQKPGQAPRLLIFGASSRATGIPDRFSGSGSGTDFTLTISRLEPEDFAVYHCQQYGNSPLTFGGGTKVEIK

SEQ ID NO: 1097 - DNA, 729 bp, artificial
  VH-VL of CDH19 25G10.1
caggtgcagctgcaggaatccggccctggcctggtcaagccctccgagacactgtccctgacctgcaccgtgtccggcggctccatctccggctactactggtcctggatccggcagccccctggcaagggcctggaatggatcggctacatctactacatcggctccaccaactacaaccccagcctgaagtccagagtgaccatgtccgtggacacctccaagaaccagttctccctgaagctgtcctccgtgaccgccgctgacaccgccgtgtactactgcgccagagatggctcctccggctggtatcgttggttcgacccttggggccagggcaccctggtcaccgtgtctagcggaggcggaggatctggtggcggtggttctggcggcggaggctccgagatcgtgctgacccagtcccctggcaccctgtccctgagccctggcgagagagccaccctgtcctgcagagcctcccagtccgtgtcctcctcctacctggcttggtatcagcagaagcccggccaggcccctcggctgctgatcttcggcgcctcttccagagccaccggcatccctgaccggttctccggctctggctccggcaccgacttcaccctgaccatctcccggctggaacccgaggacttcgctgtgtaccactgccagcagtacggcaacagccccctgaccttcggcggaggcaccaaggtggaaatcaag

SEQ ID NO: 1098 - protein, 243 aa, artificial
  VH-VL of CDH19 25G10.1
QVQLQESGPGLVKPSETLSLTCTVSGGSISGYYWSWIRQPPGKGLEWIGYIYYIGSTNYNPSLKSRVTMSVDTSKNQFSLKLSSVTAADTAVYYCARDGSSGWYRWFDPWGQGTLVTVSSGGGGSGGGGSGGGGSEIVLTQSPGTLSLSPGERATLSCRASQSVSSSYLAWYQQKPGQAPRLLIFGASSRATGIPDRFSGSGSGTDFTLTISRLEPEDFAVYHCQQYGNSPLTFGGGTKVEIK

SEQ ID NO: 1099 - protein, 504 aa, artificial
  CDH19 25G10.1 x I2C
QVQLQESGPGLVKPSETLSLTCTVSGGSISGYYWSWIRQPPGKGLEWIGYIYYIGSTNYNPSLKSRVTMSVDTSKNQFSLKLSSVTAADTAVYYCARDGSSGWYRWFDPWGQGTLVTVSSGGGGSGGGGSGGGGSEIVLTQSPGTLSLSPGERATLSCRASQSVSSSYLAWYQQKPGQAPRLLIFGASSRATGIPDRFSGSGSGTDFTLTISRLEPEDFAVYHCQQYGNSPLTFGGGTKVEIKSGGGGSEVQLVESGGGLVQPGGSLKLSCAASGFTFNKYAMNWVRQAPGKGLEWVARIRSKYNNYATYYADSVKDRFTISRDDSKNTAYLQMNNLKTEDTAVYYCVRHGNFGNSYISYWAYWGQGTLVTVSSGGGGSGGGGSGGGGSQTVVTQEPSLTVSPGGTVTLTCGSSTGAVTSGNYPNWVQQKPGQAPRGLIGGTKFLAPGTPARFSGSLLGGKAALTLSGVQPEDEAEYYCVLWYSNRWVFGGGTKLTVLHHHHHH

SEQ ID NO: 1100 - protein, 5 aa, artificial
  CDR-H1 of CDH19 26D1.1
SYYMS

SEQ ID NO: 1101 - protein, 17 aa, artificial
  CDR-H2 of CDH19 26D1.1
IIHPSGGDTTYAQKFQG

SEQ ID NO: 1102 - protein, 11 aa, artificial
  CDR-H3 of CDH19 26D1.1
GGIKLWLHFDY

SEQ ID NO: 1103 - protein, 13 aa, artificial
  CDR-L1 of CDH19 26D1.1
SGSRSNIGSNFVN

SEQ ID NO: 1104 - protein, 7 aa, artificial
  CDR-L2 of CDH19 26D1.1
TNNQRPS

SEQ ID NO: 1105 - protein, 11 aa, artificial
  CDR-L3 of CDH19 26D1.1
AVWDDSLNGWV

SEQ ID NO: 1106 - DNA, 360 bp, artificial
  VH of CDH19 26D1.1
caggtgcagctggtgcagtctggcgccgaagtgaagaaacctggcgcctccgtgaaggtgtcctgcaaggcctcccggtacaccttcaccagctactacatgtcctgggtccgacaggccccaggccagggcctggaatggatgggcatcatccacccctctggcggcgacaccacctacgcccagaaattccagggcagagtgaccatgaccggcgacacctccacctccaccgtgtatatggaactgtcctccctgcggagcgaggacaccgccgtgtactactgcgccagaggcggcatcaagctgtggctgcacttcgactactggggccagggcaccctggtcaccgtgtctagc

SEQ ID NO: 1107 - protein, 120 aa, artificial; identical to SEQ ID NO: 372
  VH of CDH19 26D1.1

SEQ ID NO: 1108 - DNA, 330 bp, artificial
  VL of CDH19 26D1.1
cattccgtgctgacccagtctccttccgcctccggcacccctggccagcgcgtgaccatctcctgctccggctcccggtccaacatcggctccaacttcgtgaactggtatcagcagctgcccggcaccgcccccaagctgctgatctacaccaacaaccagcggccctccggcgtgcccgaccggttctctggctccaagtctggcacctccgcctccctggccatctccggcctgcagtctgaggacgaggccgactactactgtgccgtgtgggacgactccctgaacggctgggtgttcggcggaggcaccaagctgaccgtgctg

SEQ ID NO: 1109 - protein, 110 aa, artificial
  VL of CDH19 26D1.1
HSVLTQSPSASGTPGQRVTISCSGSRSNIGSNFVNWYQQLPGTAPKLLIYTNNQRPSGVPDRFSGSKSGTSASLAISGLQSEDEADYYCAVWDDSLNGWVFGGGTKLTVL

SEQ ID NO: 1110 - DNA, 735 bp, artificial
  VH-VL of CDH19 26D1.1
caggtgcagctggtgcagtctggcgccgaagtgaagaaacctggcgcctccgtgaaggtgtcctgcaaggcctcccggtacaccttcaccagctactacatgtcctgggtccgacaggccccaggccagggcctggaatggatgggcatcatccacccctctggcggcgacaccacctacgcccagaaattccagggcagagtgaccatgaccggcgacacctccacctccaccgtgtatatggaactgtcctccctgcggagcgaggacaccgccgtgtactactgcgccagaggcggcatcaagctgtggctgcacttcgactactggggccagggcaccctggtcaccgtgtctagcggaggcggaggatctggtggcggtggttctggcggcggaggctcccattccgtgctgacccagtctccttccgcctccggcacccctggccagcgcgtgaccatctcctgctccggctcccggtccaacatcggctccaacttcgtgaactggtatcagcagctgcccggcaccgcccccaagctgctgatctacaccaacaaccagcggccctccggcgtgcccgaccggttctctggctccaagtctggcacctccgcctccctggccatctccggcctgcagtctgaggacgaggccgactactactgtgccgtgtgggacgactccctgaacggctgggtgttcggcggaggcaccaagctgaccgtgctg

SEQ ID NO: 1111 - protein, 245 aa, artificial
  VH-VL of CDH19 26D1.1
QVQLVQSGAEVKKPGASVKVSCKASRYTFTSYYMSWVRQAPGQGLEWMGIIHPSGGDTTYAQKFQGRVTMTGDTSTSTVYMELSSLRSEDTAVYYCARGGIKLWLHFDYWGQGTLVTVSSGGGGSGGGGSGGGGSHSVLTQSPSASGTPGQRVTISCSGSRSNIGSNFVNWYQQLPGTAPKLLIYTNNQRPSGVPDRFSGSKSGTSASLAISGLQSEDEADYYCAVWDDSLNGWVFGGGTKLTVL

SEQ ID NO: 1112 - protein, 7 aa, artificial
  CDH19 26D1.1 x I2C
  misc_feature (5)..(5): Xaa can be any naturally occurring amino acid
CDHDXIC

SEQ ID NO: 1113 - protein, 5 aa, artificial
  CDR-H1 of CDH19 26F12.1
NYYMS

SEQ ID NO: 1114 - protein, 17 aa, artificial
  CDR-H2 of CDH19 26F12.1
IINPSGGDSTYAQKFQG

SEQ ID NO: 1115 - protein, 11 aa, artificial
  CDR-H3 of CDH19 26F12.1
GGIQLWLHFDY

SEQ ID NO: 1116 - protein, 13 aa, artificial
  CDR-L1 of CDH19 26F12.1
SGSRSNIGSNFVN

SEQ ID NO: 1117 - protein, 7 aa, artificial
  CDR-L2 of CDH19 26F12.1
TNYQRPS

SEQ ID NO: 1118 - protein, 11 aa, artificial
  CDR-L3 of CDH19 26F12.1
AVWDDSLNGWV

SEQ ID NO: 1119 - DNA, 360 bp, artificial
  VH of CDH19 26F12.1
caggtgcagctggtgcagtctggcgccgaagtgaagaaacctggcgcctccgtgaaggtgtcctgcaaggcctcccggtacaccttcaccaactactacatgtcctgggtccgacaggccccaggccagggcctggaatggatgggcatcatcaacccctctggcggcgactccacctacgcccagaagttccagggccggctgaccatgaccggcgacacctccacctccaccgtgtatatggaactgtcctccctgcggagcgaggacaccgccgtgtactactgcgccagaggcggcatccagctgtggctgcacttcgactactggggccagggcaccctggtcaccgtgtctagc

SEQ ID NO: 1120 - protein, 120 aa, artificial; identical to SEQ ID NO: 344
  VH of CDH19 26F12.1

SEQ ID NO: 1121 - DNA, 330 bp, artificial
  VL of CDH19 26F12.1
cagtctgtgctgacccagtccccttccgcctctggcacccctggccagaaagtgaccatctcctgctccggctcccggtccaacatcggctccaacttcgtgaactggtatcagcagctgcccggcaccgcccccaagctgctgatctacaccaactaccagcggccctccggcgtgcccgaccggttctctggctccaagtctggcacctccgcctccctggccatctccggcctgcagtctgaggacgaggccgactactactgtgccgtgtgggacgactccctgaacggctgggtgttcggcggaggcaccaagctgaccgtgctg

SEQ ID NO: 1122 - protein, 110 aa, artificial
  VL of CDH19 26F12.1
QSVLTQSPSASGTPGQKVTISCSGSRSNIGSNFVNWYQQLPGTAPKLLIYTNYQRPSGVPDRFSGSKSGTSASLAISGLQSEDEADYYCAVWDDSLNGWVFGGGTKLTVL

SEQ ID NO: 1123 - DNA, 735 bp, artificial
  VH-VL of CDH19 26F12.1
caggtgcagctggtgcagtctggcgccgaagtgaagaaacctggcgcctccgtgaaggtgtcctgcaaggcctcccggtacaccttcaccaactactacatgtcctgggtccgacaggccccaggccagggcctggaatggatgggcatcatcaacccctctggcggcgactccacctacgcccagaagttccagggccggctgaccatgaccggcgacacctccacctccaccgtgtatatggaactgtcctccctgcggagcgaggacaccgccgtgtactactgcgccagaggcggcatccagctgtggctgcacttcgactactggggccagggcaccctggtcaccgtgtctagcggaggcggaggatctggtggcggtggttctggcggcggaggctcccagtctgtgctgacccagtccccttccgcctctggcacccctggccagaaagtgaccatctcctgctccggctcccggtccaacatcggctccaacttcgtgaactggtatcagcagctgcccggcaccgcccccaagctgctgatctacaccaactaccagcggccctccggcgtgcccgaccggttctctggctccaagtctggcacctccgcctccctggccatctccggcctgcagtctgaggacgaggccgactactactgtgccgtgtgggacgactccctgaacggctgggtgttcggcggaggcaccaagctgaccgtgctg

SEQ ID NO: 1124 - protein, 245 aa, artificial
  VH-VL of CDH19 26F12.1
QVQLVQSGAEVKKPGASVKVSCKASRYTFTNYYMSWVRQAPGQGLEWMGIINPSGGDSTYAQKFQGRLTMTGDTSTSTVYMELSSLRSEDTAVYYCARGGIQLWLHFDYWGQGTLVTVSSGGGGSGGGGSGGGGSQSVLTQSPSASGTPGQKVTISCSGSRSNIGSNFVNWYQQLPGTAPKLLIYTNYQRPSGVPDRFSGSKSGTSASLAISGLQSEDEADYYCAVWDDSLNGWVFGGGTKLTVL

SEQ ID NO: 1125 - protein, 506 aa, artificial
  CDH19 26F12.1 x I2C
QVQLVQSGAEVKKPGASVKVSCKASRYTFTNYYMSWVRQAPGQGLEWMGIINPSGGDSTYAQKFQGRLTMTGDTSTSTVYMELSSLRSEDTAVYYCARGGIQLWLHFDYWGQGTLVTVSSGGGGSGGGGSGGGGSQSVLTQSPSASGTPGQKVTISCSGSRSNIGSNFVNWYQQLPGTAPKLLIYTNYQRPSGVPDRFSGSKSGTSASLAISGLQSEDEADYYCAVWDDSLNGWVFGGGTKLTVLSGGGGSEVQLVESGGGLVQPGGSLKLSCAASGFTFNKYAMNWVRQAPGKGLEWVARIRSKYNNYATYYADSVKDRFTISRDDSKNTAYLQMNNLKTEDTAVYYCVRHGNFGNSYISYWAYWGQGTLVTVSSGGGGSGGGGSGGGGSQTVVTQEPSLTVSPGGTVTLTCGSSTGAVTSGNYPNWVQQKPGQAPRGLIGGTKFLAPGTPARFSGSLLGGKAALTLSGVQPEDEAEYYCVLWYSNRWVFGGGTKLTVLHHHHHH

SEQ ID NO: 1126 - protein, 5 aa, artificial
  CDR-H1 of CDH19 4A9
GYYWS

SEQ ID NO: 1127 - protein, 16 aa, artificial
  CDR-H2 of CDH19 4A9
YFSYSGSTNYNPSLKS

SEQ ID NO: 1128 - protein, 8 aa, artificial
  CDR-H3 of CDH19 4A9
NWAFHFDF

SEQ ID NO: 1129 - protein, 14 aa, artificial
  CDR-L1 of CDH19 4A9
TGSSSNIGTGYAVH

SEQ ID NO: 1130 - protein, 7 aa, artificial
  CDR-L2 of CDH19 4A9
GNNNRPS

SEQ ID NO: 1131 - protein, 11 aa, artificial
  CDR-L3 of CDH19 4A9
QSYDSRLSGWV

SEQ ID NO: 1132 - DNA, 348 bp, artificial
  VH of CDH19 4A9
caggtgcagctgcaggaatccggccctggcctggtcaagccctccgagacactgtccctgacctgcaccgtgtccggcggctccatctccggctactactggtcctggatccggcagccccctggcaagggcctggaatggttcgcctacttctcctactccggctccaccaactacaaccccagcctgaagtccagagtgaccctgtccgtggacacctccaagaaccagttctccctgaagctgtcctccgtgaccgccgctgacaccgccgtgtactactgcgcccggaactgggccttccacttcgatttctggggccagggcaccctggtcaccgtgtctagc

SEQ ID NO: 1133 - protein, 116 aa, artificial; identical to SEQ ID NO: 362
  VH of CDH19 4A9

SEQ ID NO: 1134 - DNA, 333 bp, artificial
  VL of CDH19 4A9
cagtctgtgctgacccagcctccctctgtgtctggcgcccctggccagagagtgaccatctcctgcaccggctcctccagcaacatcggcaccggctacgccgtgcactggtatcagcagttccccggcaccgcccccaagctgctgatctacggcaacaacaaccggccctccggcgtgcccgaccggttctctggctccaagtctggcacctccgcctccctggctatcaccggcctgcaggctgaggacgaggccgactactactgccagtcctacgactcccggctgtccggctgggtgttcggcggaggcaccaagctgaccgtgctg

SEQ ID NO: 1135 - protein, 111 aa, artificial
  VL of CDH19 4A9
QSVLTQPPSVSGAPGQRVTISCTGSSSNIGTGYAVHWYQQFPGTAPKLLIYGNNNRPSGVPDRFSGSKSGTSASLAITGLQAEDEADYYCQSYDSRLSGWVFGGGTKLTVL

SEQ ID NO: 1136 - DNA, 726 bp, artificial
  VH-VL of CDH19 4A9
caggtgcagctgcaggaatccggccctggcctggtcaagccctccgagacactgtccctgacctgcaccgtgtccggcggctccatctccggctactactggtcctggatccggcagccccctggcaagggcctggaatggttcgcctacttctcctactccggctccaccaactacaaccccagcctgaagtccagagtgaccctgtccgtggacacctccaagaaccagttctccctgaagctgtcctccgtgaccgccgctgacaccgccgtgtactactgcgcccggaactgggccttccacttcgatttctggggccagggcaccctggtcaccgtgtctagcggaggcggaggatctggtggcggtggttctggcggcggaggctcccagtctgtgctgacccagcctccctctgtgtctggcgcccctggccagagagtgaccatctcctgcaccggctcctccagcaacatcggcaccggctacgccgtgcactggtatcagcagttccccggcaccgcccccaagctgctgatctacggcaacaacaaccggccctccggcgtgcccgaccggttctctggctccaagtctggcacctccgcctccctggctatcaccggcctgcaggctgaggacgaggccgactactactgccagtcctacgactcccggctgtccggctgggtgttcggcggaggcaccaagctgaccgtgctg

SEQ ID NO: 1137 - protein, 242 aa, artificial
  VH-VL of CDH19 4A9
QVQLQESGPGLVKPSETLSLTCTVSGGSISGYYWSWIRQPPGKGLEWFAYFSYSGSTNYNPSLKSRVTLSVDTSKNQFSLKLSSVTAADTAVYYCARNWAFHFDFWGQGTLVTVSSGGGGSGGGGSGGGGSQSVLTQPPSVSGAPGQRVTISCTGSSSNIGTGYAVHWYQQFPGTAPKLLIYGNNNRPSGVPDRFSGSKSGTSASLAITGLQAEDEADYYCQSYDSRLSGWVFGGGTKLTVL

SEQ ID NO: 1138 - protein, 503 aa, artificial
  CDH19 4A9  x I2C
QVQLQESGPGLVKPSETLSLTCTVSGGSISGYYWSWIRQPPGKGLEWFAYFSYSGSTNYNPSLKSRVTLSVDTSKNQFSLKLSSVTAADTAVYYCARNWAFHFDFWGQGTLVTVSSGGGGSGGGGSGGGGSQSVLTQPPSVSGAPGQRVTISCTGSSSNIGTGYAVHWYQQFPGTAPKLLIYGNNNRPSGVPDRFSGSKSGTSASLAITGLQAEDEADYYCQSYDSRLSGWVFGGGTKLTVLSGGGGSEVQLVESGGGLVQPGGSLKLSCAASGFTFNKYAMNWVRQAPGKGLEWVARIRSKYNNYATYYADSVKDRFTISRDDSKNTAYLQMNNLKTEDTAVYYCVRHGNFGNSYISYWAYWGQGTLVTVSSGGGGSGGGGSGGGGSQTVVTQEPSLTVSPGGTVTLTCGSSTGAVTSGNYPNWVQQKPGQAPRGLIGGTKFLAPGTPARFSGSLLGGKAALTLSGVQPEDEAEYYCVLWYSNRWVFGGGTKLTVLHHHHHH

SEQ ID NO: 1139 - protein, 5 aa, artificial
  CDR-H1 of CDH19 4B10
SYDMH

SEQ ID NO: 1140 - protein, 17 aa, artificial
  CDR-H2 of CDH19 4B10
VISYDGTNEYYADSVKG

SEQ ID NO: 1141 - protein, 10 aa, artificial
  CDR-H3 of CDH19 4B10
ERYFDWSFDY

SEQ ID NO: 1142 - protein, 12 aa, artificial
  CDR-L1 of CDH19 4B10
RASQSVSNTYLA

SEQ ID NO: 1143 - protein, 7 aa, artificial
  CDR-L2 of CDH19 4B10
GASSRAT

SEQ ID NO: 1144 - protein, 8 aa, artificial
  CDR-L3 of CDH19 4B10
QQYSNSWT

SEQ ID NO: 1145 - DNA, 357 bp, artificial
  VH of CDH19 4B10
caggtgcagctggtggaatccggcggaggcgtggtgcagcctggccggtccctgagactgtcttgcgccgcctccggcttcaccttctccagctacgacatgcactgggtccgacaggcccctggcaagggcctggaatgggtggccgtgatctcctacgacggcaccaacgagtactacgccgactccgtgaagggccggttcaccatctcccgggacacctccaagaacaccctgtacctgcagatgaactccctgcgggccgaggacaccgccgtgtactactgcgccagagagcggtacttcgactggtccttcgactactggggccagggcaccctggtgtccgtgtctagc

SEQ ID NO: 1146 - protein, 119 aa, artificial; identical to SEQ ID NO: 346
  VH of CDH19 4B10

SEQ ID NO: 1147 - DNA, 321 bp, artificial
  VL of CDH19 4B10
gagatcgtgctgacccagtcccctggcaccctgtccctgagccctggcgagagagccaccctgtcttgccgggcctcccagtccgtgtccaacacctacctggcctggtatcaccagcgccctggccaggcccctcggctgctgatctacggcgcctcttccagagccaccggcatccctgaccggttctccggctctggctctggcaccgacttcgccctgaccatctccagcctggaacccgaggatttcgctgtgtactattgccagcagtactccaactcctggaccttcggacagggcaccaaggtggaaatcaag

SEQ ID NO: 1148 - protein, 107 aa, artificial
  VL of CDH19 4B10
EIVLTQSPGTLSLSPGERATLSCRASQSVSNTYLAWYHQRPGQAPRLLIYGASSRATGIPDRFSGSGSGTDFALTISSLEPEDFAVYYCQQYSNSWTFGQGTKVEIK

SEQ ID NO: 1149 - DNA, 723 bp, artificial
  VH-VL of CDH19 4B10
caggtgcagctggtggaatccggcggaggcgtggtgcagcctggccggtccctgagactgtcttgcgccgcctccggcttcaccttctccagctacgacatgcactgggtccgacaggcccctggcaagggcctggaatgggtggccgtgatctcctacgacggcaccaacgagtactacgccgactccgtgaagggccggttcaccatctcccgggacacctccaagaacaccctgtacctgcagatgaactccctgcgggccgaggacaccgccgtgtactactgcgccagagagcggtacttcgactggtccttcgactactggggccagggcaccctggtgtccgtgtctagcggaggcggaggatctggtggcggtggttctggcggcggaggctccgagatcgtgctgacccagtcccctggcaccctgtccctgagccctggcgagagagccaccctgtcttgccgggcctcccagtccgtgtccaacacctacctggcctggtatcaccagcgccctggccaggcccctcggctgctgatctacggcgcctcttccagagccaccggcatccctgaccggttctccggctctggctctggcaccgacttcgccctgaccatctccagcctggaacccgaggatttcgctgtgtactattgccagcagtactccaactcctggaccttcggacagggcaccaaggtggaaatcaag

SEQ ID NO: 1150 - protein, 241 aa, artificial
  VH-VL of CDH19 4B10
QVQLVESGGGVVQPGRSLRLSCAASGFTFSSYDMHWVRQAPGKGLEWVAVISYDGTNEYYADSVKGRFTISRDTSKNTLYLQMNSLRAEDTAVYYCARERYFDWSFDYWGQGTLVSVSSGGGGSGGGGSGGGGSEIVLTQSPGTLSLSPGERATLSCRASQSVSNTYLAWYHQRPGQAPRLLIYGASSRATGIPDRFSGSGSGTDFALTISSLEPEDFAVYYCQQYSNSWTFGQGTKVEIK

SEQ ID NO: 1151 - protein, 502 aa, artificial
  CDH19 4B10 x I2C
QVQLVESGGGVVQPGRSLRLSCAASGFTFSSYDMHWVRQAPGKGLEWVAVISYDGTNEYYADSVKGRFTISRDTSKNTLYLQMNSLRAEDTAVYYCARERYFDWSFDYWGQGTLVSVSSGGGGSGGGGSGGGGSEIVLTQSPGTLSLSPGERATLSCRASQSVSNTYLAWYHQRPGQAPRLLIYGASSRATGIPDRFSGSGSGTDFALTISSLEPEDFAVYYCQQYSNSWTFGQGTKVEIKSGGGGSEVQLVESGGGLVQPGGSLKLSCAASGFTFNKYAMNWVRQAPGKGLEWVARIRSKYNNYATYYADSVKDRFTISRDDSKNTAYLQMNNLKTEDTAVYYCVRHGNFGNSYISYWAYWGQGTLVTVSSGGGGSGGGGSGGGGSQTVVTQEPSLTVSPGGTVTLTCGSSTGAVTSGNYPNWVQQKPGQAPRGLIGGTKFLAPGTPARFSGSLLGGKAALTLSGVQPEDEAEYYCVLWYSNRWVFGGGTKLTVLHHHHHH

SEQ ID NO: 1152 - protein, 5 aa, artificial
  CDR-H1 of CDH19 4F3
SYDMD

SEQ ID NO: 1153 - protein, 17 aa, artificial
  CDR-H2 of CDH19 4F3
VIWYDGSNKYYADSVRG

SEQ ID NO: 1154 - protein, 10 aa, artificial
  CDR-H3 of CDH19 4F3
ETGEGWYFDL

SEQ ID NO: 1155 - protein, 12 aa, artificial
  CDR-L1 of CDH19 4F3
RASQSVSSSYLA

SEQ ID NO: 1156 - protein, 7 aa, artificial
  CDR-L2 of CDH19 4F3
GASSRAT

SEQ ID NO: 1157 - protein, 8 aa, artificial
  CDR-L3 of CDH19 4F3
QQYGSSWT

SEQ ID NO: 1158 - DNA, 357 bp, artificial
  VH of CDH19 4F3
caggtgcagctggtggaatccggcggaggcgtggtgcagcctggccggtccctgagactgtcttgtgccgcctccggcttcagcttctcctcctacgacatggactgggtccgacagacccccggcaagggcctggaatgggtggccgtgatttggtacgacggctccaacaagtactacgccgactccgtgcggggcagattcaccatctcccgggacaactccaagaacaccctgtttctgcagatgaactccctgcgggtggaagataccgccgtgtactactgcgccagagagacaggcgagggctggtacttcgacctgtggggcagaggcaccctggtcaccgtgtctagc

SEQ ID NO: 1159 - protein, 119 aa, artificial; identical to SEQ ID NO: 348
  VH of CDH19 4F3

SEQ ID NO: 1160 - DNA, 321 bp, artificial
  VL of CDH19 4F3
gagatcgtgctgacccagtcccctggcaccctgtccctgagccctggcgagagagccaccctgtcctgcagagcctcccagtccgtgtcctcctcctacctggcctggtatcagcagaagcccggccaggcccctcggctgctgatctacggcgcctcttccagagccaccggcatccctgaccggttctccggctctggctccggcaccgacttcaccctgaccatcagccggctggaacccgaggacttcgctgtgtactattgccagcagtacggctcctcctggaccttcggccagggcaccaaggtggaaatcaag

SEQ ID NO: 1161 - protein, 107 aa, artificial
  VL of CDH19 4F3
EIVLTQSPGTLSLSPGERATLSCRASQSVSSSYLAWYQQKPGQAPRLLIYGASSRATGIPDRFSGSGSGTDFTLTISRLEPEDFAVYYCQQYGSSWTFGQGTKVEIK

SEQ ID NO: 1162 - DNA, 723 bp, artificial
  VH-VL of CDH19 4F3
caggtgcagctggtggaatccggcggaggcgtggtgcagcctggccggtccctgagactgtcttgtgccgcctccggcttcagcttctcctcctacgacatggactgggtccgacagacccccggcaagggcctggaatgggtggccgtgatttggtacgacggctccaacaagtactacgccgactccgtgcggggcagattcaccatctcccgggacaactccaagaacaccctgtttctgcagatgaactccctgcgggtggaagataccgccgtgtactactgcgccagagagacaggcgagggctggtacttcgacctgtggggcagaggcaccctggtcaccgtgtctagcggaggcggaggatctggtggcggtggttctggcggcggaggctccgagatcgtgctgacccagtcccctggcaccctgtccctgagccctggcgagagagccaccctgtcctgcagagcctcccagtccgtgtcctcctcctacctggcctggtatcagcagaagcccggccaggcccctcggctgctgatctacggcgcctcttccagagccaccggcatccctgaccggttctccggctctggctccggcaccgacttcaccctgaccatcagccggctggaacccgaggacttcgctgtgtactattgccagcagtacggctcctcctggaccttcggccagggcaccaaggtggaaatcaag

SEQ ID NO: 1163 - protein, 241 aa, artificial
  VH-VL of CDH19 4F3
QVQLVESGGGVVQPGRSLRLSCAASGFSFSSYDMDWVRQTPGKGLEWVAVIWYDGSNKYYADSVRGRFTISRDNSKNTLFLQMNSLRVEDTAVYYCARETGEGWYFDLWGRGTLVTVSSGGGGSGGGGSGGGGSEIVLTQSPGTLSLSPGERATLSCRASQSVSSSYLAWYQQKPGQAPRLLIYGASSRATGIPDRFSGSGSGTDFTLTISRLEPEDFAVYYCQQYGSSWTFGQGTKVEIK

SEQ ID NO: 1164 - protein, 502 aa, artificial
  CDH19 4F3 x I2C
QVQLVESGGGVVQPGRSLRLSCAASGFSFSSYDMDWVRQTPGKGLEWVAVIWYDGSNKYYADSVRGRFTISRDNSKNTLFLQMNSLRVEDTAVYYCARETGEGWYFDLWGRGTLVTVSSGGGGSGGGGSGGGGSEIVLTQSPGTLSLSPGERATLSCRASQSVSSSYLAWYQQKPGQAPRLLIYGASSRATGIPDRFSGSGSGTDFTLTISRLEPEDFAVYYCQQYGSSWTFGQGTKVEIKSGGGGSEVQLVESGGGLVQPGGSLKLSCAASGFTFNKYAMNWVRQAPGKGLEWVARIRSKYNNYATYYADSVKDRFTISRDDSKNTAYLQMNNLKTEDTAVYYCVRHGNFGNSYISYWAYWGQGTLVTVSSGGGGSGGGGSGGGGSQTVVTQEPSLTVSPGGTVTLTCGSSTGAVTSGNYPNWVQQKPGQAPRGLIGGTKFLAPGTPARFSGSLLGGKAALTLSGVQPEDEAEYYCVLWYSNRWVFGGGTKLTVLHHHHHH

SEQ ID NO: 1165 - protein, 5 aa, artificial
  CDR-H1 of CDH19 4F7
SYSWS

SEQ ID NO: 1166 - protein, 16 aa, artificial
  CDR-H2 of CDH19 4F7
YIYYSGSTNYNPSLKS

SEQ ID NO: 1167 - protein, 8 aa, artificial
  CDR-H3 of CDH19 4F7
NWAFHFDY

SEQ ID NO: 1168 - protein, 14 aa, artificial
  CDR-L1 of CDH19 4F7
TGSSSNIGTGYDVH

SEQ ID NO: 1169 - protein, 7 aa, artificial
  CDR-L2 of CDH19 4F7
GNSNRPS

SEQ ID NO: 1170 - protein, 11 aa, artificial
  CDR-L3 of CDH19 4F7
QSYDSSLSGWV

SEQ ID NO: 1171 - DNA, 348 bp, artificial
  VH of CDH19 4F7
caggtgcagctgcaggaatccggccctggcctggtcaagccctccgagacactgtccctgacctgcaccgtgtccggcggctccatctcctcctactcttggtcctggatccggcagccccctggcaagggcctggaatggatcggctacatctactactccggctccaccaactacaaccccagcctgaagtccagagtgaccatctccctggacacctccaagaaccagttctccctgaagctgtcctccgtgaccgccgctgacaccgccgtgtactactgcgcccggaactgggccttccacttcgactactggggccagggcaccctggtcaccgtgtctagc

SEQ ID NO: 1172 - protein, 116 aa, artificial; identical to SEQ ID NO: 364
  VH of CDH19 4F7

SEQ ID NO: 1173 - DNA, 333 bp, artificial
  VL of CDH19 4F7
cagtctgtgctgacccagcctccctctgtgtctggcgcccctggccagcgcgtgaccatttcctgcaccggctcctccagcaacatcggcaccggctacgacgtgcactggtatcagcagctgcccggcaccgcccccaagctgctgatccacggcaactccaaccggccctccggcgtgcccgaccggttctctggctccaagtctggcacctccgcctccctggctatcaccggcctgcaggctgaggacgaggccgactactactgccagtcctacgactcctccctgtccggctgggtgttcggcggaggcaccagactgaccgtgctg

SEQ ID NO: 1174 - protein, 111 aa, artificial
  VL of CDH19 4F7
QSVLTQPPSVSGAPGQRVTISCTGSSSNIGTGYDVHWYQQLPGTAPKLLIHGNSNRPSGVPDRFSGSKSGTSASLAITGLQAEDEADYYCQSYDSSLSGWVFGGGTRLTVL

SEQ ID NO: 1175 - DNA, 726 bp, artificial
  VH-VL of CDH19 4F7
caggtgcagctgcaggaatccggccctggcctggtcaagccctccgagacactgtccctgacctgcaccgtgtccggcggctccatctcctcctactcttggtcctggatccggcagccccctggcaagggcctggaatggatcggctacatctactactccggctccaccaactacaaccccagcctgaagtccagagtgaccatctccctggacacctccaagaaccagttctccctgaagctgtcctccgtgaccgccgctgacaccgccgtgtactactgcgcccggaactgggccttccacttcgactactggggccagggcaccctggtcaccgtgtctagcggaggcggaggatctggtggcggtggttctggcggcggaggctcccagtctgtgctgacccagcctccctctgtgtctggcgcccctggccagcgcgtgaccatttcctgcaccggctcctccagcaacatcggcaccggctacgacgtgcactggtatcagcagctgcccggcaccgcccccaagctgctgatccacggcaactccaaccggccctccggcgtgcccgaccggttctctggctccaagtctggcacctccgcctccctggctatcaccggcctgcaggctgaggacgaggccgactactactgccagtcctacgactcctccctgtccggctgggtgttcggcggaggcaccagactgaccgtgctg

SEQ ID NO: 1176 - protein, 242 aa, artificial
  VH-VL of CDH19 4F7
QVQLQESGPGLVKPSETLSLTCTVSGGSISSYSWSWIRQPPGKGLEWIGYIYYSGSTNYNPSLKSRVTISLDTSKNQFSLKLSSVTAADTAVYYCARNWAFHFDYWGQGTLVTVSSGGGGSGGGGSGGGGSQSVLTQPPSVSGAPGQRVTISCTGSSSNIGTGYDVHWYQQLPGTAPKLLIHGNSNRPSGVPDRFSGSKSGTSASLAITGLQAEDEADYYCQSYDSSLSGWVFGGGTRLTVL

SEQ ID NO: 1177 - protein, 503 aa, artificial
  CDH19 4F7 x I2C
QVQLQESGPGLVKPSETLSLTCTVSGGSISSYSWSWIRQPPGKGLEWIGYIYYSGSTNYNPSLKSRVTISLDTSKNQFSLKLSSVTAADTAVYYCARNWAFHFDYWGQGTLVTVSSGGGGSGGGGSGGGGSQSVLTQPPSVSGAPGQRVTISCTGSSSNIGTGYDVHWYQQLPGTAPKLLIHGNSNRPSGVPDRFSGSKSGTSASLAITGLQAEDEADYYCQSYDSSLSGWVFGGGTRLTVLSGGGGSEVQLVESGGGLVQPGGSLKLSCAASGFTFNKYAMNWVRQAPGKGLEWVARIRSKYNNYATYYADSVKDRFTISRDDSKNTAYLQMNNLKTEDTAVYYCVRHGNFGNSYISYWAYWGQGTLVTVSSGGGGSGGGGSGGGGSQTVVTQEPSLTVSPGGTVTLTCGSSTGAVTSGNYPNWVQQKPGQAPRGLIGGTKFLAPGTPARFSGSLLGGKAALTLSGVQPEDEAEYYCVLWYSNRWVFGGGTKLTVLHHHHHH

SEQ ID NO: 1178 - protein, 5 aa, artificial
  CDR-H1 of CDH19 14039
SYGMH

SEQ ID NO: 1179 - protein, 17 aa, artificial
  CDR-H2 of CDH19 14039
FIWYEGSNKYYAESVKD

SEQ ID NO: 1180 - protein, 16 aa, artificial
  CDR-H3 of CDH19 14039
RAGIIGTIGYYYGMDV

SEQ ID NO: 1181 - protein, 11 aa, artificial
  CDR-L1 of CDH19 14039
SGDRLGEKYTS

SEQ ID NO: 1182 - protein, 7 aa, artificial
  CDR-L2 of CDH19 14039
QDTKRPS

SEQ ID NO: 1183 - protein, 9 aa, artificial
  CDR-L3 of CDH19 14039
QAWESSTVV

SEQ ID NO: 1184 - DNA, 375 bp, artificial
  VH of CDH19 14039
caggtgcagttggtggagtctgggggaggcgtggtccagcctggggggtccctgagactctcctgtgcagcgtctggattcaccttcagtagctatggcatgcactgggtccgccaggctccaggcaaggggctggagtgggtggcatttatatggtatgagggaagtaataaatactatgcagagtccgtgaaggaccgattcaccatctccagagacaattccaagaacacgctgtatctgcaaatgaatagcctgagagctgaggacacggctgtgtattactgtgcgagaagggccggtataataggaactataggctactactacggtatggacgtctggggccaagggaccacggtcaccgtctctagt

SEQ ID NO: 1185 - protein, 125 aa, artificial; identical to SEQ ID NO: 475
  VH of CDH19 14039

SEQ ID NO: 1186 - DNA, 318 bp, artificial
  VL of CDH19 14039
tcctatgaactgactcagccaccctcagtgtccgtgtccccaggacagacagccagcatcacctgctctggagataggttgggggaaaaatatactagctggtatcagcagaggccaggccagtcccctttgctggtcatctatcaagataccaagcggccctcagggatccctgagcgattctctggctccaactctggtaacacagccactctgaccatcagcgggacccaggctatggatgaggctgactattactgtcaggcgtgggagagcagcactgtggtattcggcggagggaccaagctgaccgtccta

SEQ ID NO: 1187 - protein, 106 aa, artificial
  VL of CDH19 14039
SYELTQPPSVSVSPGQTASITCSGDRLGEKYTSWYQQRPGQSPLLVIYQDTKRPSGIPERFSGSNSGNTATLTISGTQAMDEADYYCQAWESSTVVFGGGTKLTVL

SEQ ID NO: 1188 - DNA, 738 bp, artificial
  VH-VL of CDH19 14039
caggtgcagttggtggagtctgggggaggcgtggtccagcctggggggtccctgagactctcctgtgcagcgtctggattcaccttcagtagctatggcatgcactgggtccgccaggctccaggcaaggggctggagtgggtggcatttatatggtatgagggaagtaataaatactatgcagagtccgtgaaggaccgattcaccatctccagagacaattccaagaacacgctgtatctgcaaatgaatagcctgagagctgaggacacggctgtgtattactgtgcgagaagggccggtataataggaactataggctactactacggtatggacgtctggggccaagggaccacggtcaccgtctctagtggtggcggaggatctggcggaggtggaagcggaggcggcggatcttcctatgaactgactcagccaccctcagtgtccgtgtccccaggacagacagccagcatcacctgctctggagataggttgggggaaaaatatactagctggtatcagcagaggccaggccagtcccctttgctggtcatctatcaagataccaagcggccctcagggatccctgagcgattctctggctccaactctggtaacacagccactctgaccatcagcgggacccaggctatggatgaggctgactattactgtcaggcgtgggagagcagcactgtggtattcggcggagggaccaagctgaccgtccta

SEQ ID NO: 1189 - protein, 246 aa, artificial
  VH-VL of CDH19 14039
QVQLVESGGGVVQPGGSLRLSCAASGFTFSSYGMHWVRQAPGKGLEWVAFIWYEGSNKYYAESVKDRFTISRDNSKNTLYLQMNSLRAEDTAVYYCARRAGIIGTIGYYYGMDVWGQGTTVTVSSGGGGSGGGGSGGGGSSYELTQPPSVSVSPGQTASITCSGDRLGEKYTSWYQQRPGQSPLLVIYQDTKRPSGIPERFSGSNSGNTATLTISGTQAMDEADYYCQAWESSTVVFGGGTKLTVL

SEQ ID NO: 1190 - protein, 507 aa, artificial
  CDH19 14039 x I2C
QVQLVESGGGVVQPGGSLRLSCAASGFTFSSYGMHWVRQAPGKGLEWVAFIWYEGSNKYYAESVKDRFTISRDNSKNTLYLQMNSLRAEDTAVYYCARRAGIIGTIGYYYGMDVWGQGTTVTVSSGGGGSGGGGSGGGGSSYELTQPPSVSVSPGQTASITCSGDRLGEKYTSWYQQRPGQSPLLVIYQDTKRPSGIPERFSGSNSGNTATLTISGTQAMDEADYYCQAWESSTVVFGGGTKLTVLSGGGGSEVQLVESGGGLVQPGGSLKLSCAASGFTFNKYAMNWVRQAPGKGLEWVARIRSKYNNYATYYADSVKDRFTISRDDSKNTAYLQMNNLKTEDTAVYYCVRHGNFGNSYISYWAYWGQGTLVTVSSGGGGSGGGGSGGGGSQTVVTQEPSLTVSPGGTVTLTCGSSTGAVTSGNYPNWVQQKPGQAPRGLIGGTKFLAPGTPARFSGSLLGGKAALTLSGVQPEDEAEYYCVLWYSNRWVFGGGTKLTVLHHHHHH

SEQ ID NO: 1191 - protein, 5 aa, artificial
  CDR-H1 of CDH19 14304
SYGMH

SEQ ID NO: 1192 - protein, 17 aa, artificial
  CDR-H2 of CDH19 14304
FIWYDGSNKYYADSVKD

SEQ ID NO: 1193 - protein, 16 aa, artificial
  CDR-H3 of CDH19 14304
RAGIIGTIGYYYGMDV

SEQ ID NO: 1194 - protein, 11 aa, artificial
  CDR-L1 of CDH19 14304
SGDRLGEKYVS

SEQ ID NO: 1195 - protein, 7 aa, artificial
  CDR-L2 of CDH19 14304
QDNKWPS

SEQ ID NO: 1196 - protein, 9 aa, artificial
  CDR-L3 of CDH19 14304
QAWDSSTVV

SEQ ID NO: 1197 - DNA, 375 bp, artificial
  VH of CDH19 14304
caggtgcagttggtggagtctgggggaggcgtggtccagcctggggggtccctgagactctcctgtgcagcgtctggattcaccttcagtagctatggcatgcactgggtccgccaggctccaggcaaggggctggagtgggtggcatttatatggtatgatggaagtaataaatactatgcagactccgtgaaggaccgattcaccatctccagagacaattccaagaacacgctgtatctgcaaatgaaaagcctgagagctgaggacacggctgtgtattactgtgcgagaagggccggtataataggaactataggctactactacggtatggacgtctggggccaagggaccacggtcaccgtctctagt

SEQ ID NO: 1198 - protein, 125 aa, artificial; identical to SEQ ID NO: 543
  VH of CDH19 14304

SEQ ID NO: 1199 - DNA, 318 bp, artificial
  VL of CDH19 14304
tcctatgagctgactcagccaccctcagtgtccgtgtccccaggacagacagccagcatcacctgctctggagatagattgggggagaaatatgttagctggtatcagcagaagccaggccagtcccctatactggtcatctatcaagataataagtggccctcagggatccctgagcgattctctggctccaactctgggaacacagccactctgaccatcagcgggacccaggctatggatgaggctgactattactgtcaggcgtgggacagcagcactgtggtattcggcggggggaccaagctgaccgtccta

SEQ ID NO: 1200 - protein, 106 aa, artificial
  VL of CDH19 14304
SYELTQPPSVSVSPGQTASITCSGDRLGEKYVSWYQQKPGQSPILVIYQDNKWPSGIPERFSGSNSGNTATLTISGTQAMDEADYYCQAWDSSTVVFGGGTKLTVL

SEQ ID NO: 1201 - DNA, 738 bp, artificial
  VH-VL of CDH19 14304
caggtgcagttggtggagtctgggggaggcgtggtccagcctggggggtccctgagactctcctgtgcagcgtctggattcaccttcagtagctatggcatgcactgggtccgccaggctccaggcaaggggctggagtgggtggcatttatatggtatgatggaagtaataaatactatgcagactccgtgaaggaccgattcaccatctccagagacaattccaagaacacgctgtatctgcaaatgaaaagcctgagagctgaggacacggctgtgtattactgtgcgagaagggccggtataataggaactataggctactactacggtatggacgtctggggccaagggaccacggtcaccgtctctagtggtggcggaggatctggcggaggtggaagcggaggcggcggatcttcctatgagctgactcagccaccctcagtgtccgtgtccccaggacagacagccagcatcacctgctctggagatagattgggggagaaatatgttagctggtatcagcagaagccaggccagtcccctatactggtcatctatcaagataataagtggccctcagggatccctgagcgattctctggctccaactctgggaacacagccactctgaccatcagcgggacccaggctatggatgaggctgactattactgtcaggcgtgggacagcagcactgtggtattcggcggggggaccaagctgaccgtccta

SEQ ID NO: 1202 - protein, 246 aa, artificial
  VH-VL of CDH19 14304
QVQLVESGGGVVQPGGSLRLSCAASGFTFSSYGMHWVRQAPGKGLEWVAFIWYDGSNKYYADSVKDRFTISRDNSKNTLYLQMKSLRAEDTAVYYCARRAGIIGTIGYYYGMDVWGQGTTVTVSSGGGGSGGGGSGGGGSSYELTQPPSVSVSPGQTASITCSGDRLGEKYVSWYQQKPGQSPILVIYQDNKWPSGIPERFSGSNSGNTATLTISGTQAMDEADYYCQAWDSSTVVFGGGTKLTVL

SEQ ID NO: 1203 - protein, 507 aa, artificial
  CDH19 14304 x I2C
QVQLVESGGGVVQPGGSLRLSCAASGFTFSSYGMHWVRQAPGKGLEWVAFIWYDGSNKYYADSVKDRFTISRDNSKNTLYLQMKSLRAEDTAVYYCARRAGIIGTIGYYYGMDVWGQGTTVTVSSGGGGSGGGGSGGGGSSYELTQPPSVSVSPGQTASITCSGDRLGEKYVSWYQQKPGQSPILVIYQDNKWPSGIPERFSGSNSGNTATLTISGTQAMDEADYYCQAWDSSTVVFGGGTKLTVLSGGGGSEVQLVESGGGLVQPGGSLKLSCAASGFTFNKYAMNWVRQAPGKGLEWVARIRSKYNNYATYYADSVKDRFTISRDDSKNTAYLQMNNLKTEDTAVYYCVRHGNFGNSYISYWAYWGQGTLVTVSSGGGGSGGGGSGGGGSQTVVTQEPSLTVSPGGTVTLTCGSSTGAVTSGNYPNWVQQKPGQAPRGLIGGTKFLAPGTPARFSGSLLGGKAALTLSGVQPEDEAEYYCVLWYSNRWVFGGGTKLTVLHHHHHH

SEQ ID NO: 1204 - protein, 5 aa, artificial
  CDR-H1 of CDH19 14301
SYGMH

SEQ ID NO: 1205 - protein, 17 aa, artificial
  CDR-H2 of CDH19 14301
FIWYDGSNKYYADSVKD

SEQ ID NO: 1206 - protein, 16 aa, artificial
  CDR-H3 of CDH19 14301
RAGIIGTIGYYYGMDV

SEQ ID NO: 1207 - protein, 11 aa, artificial
  CDR-L1 of CDH19 14301
SGDRLGEKYTC

SEQ ID NO: 1208 - protein, 7 aa, artificial
  CDR-L2 of CDH19 14301
QDTKRPS

SEQ ID NO: 1209 - protein, 9 aa, artificial
  CDR-L3 of CDH19 14301
QAWESSTVV

SEQ ID NO: 1210 - DNA, 375 bp, artificial
  VH of CDH19 14301
caggtgcagttggtggagtctgggggaggcgtggtccagcctgggaggtccctgagactctcctgtgcagcgtctggattcaccttcagtagctatggcatgcactgggtccgccaggctccaggcaaggggctggagtgggtggcatttatatggtatgatggaagtaataaatactatgcagactccgtgaaggaccgattcaccatctccagagacaattccaagaacacgctgtatctgcaaatgaaaagcctgagagctgaggacacggctgtgtattactgtgcgagaagggccggtataataggaactataggctactactacggtatggacgtctggggccaagggaccacggtcaccgtctctagt

SEQ ID NO: 1211 - protein, 125 aa, artificial; identical to SEQ ID NO: 384
  VH of CDH19 14301

SEQ ID NO: 1212 - DNA, 318 bp, artificial
  VL of CDH19 14301
tcctatgaactgactcagccaccctcagtgtccgtgtccccaggacagacagccagcatcacctgctctggagataggttgggggaaaaatatacttgctggtatcagcagaggccaggccagtcccctttgctggtcatctatcaagataccaagcggccctcagggatccctgagcgattctctggctccaactctggtaacacagccactctgaccatcagcgggacccaggctatggatgaggctgactattactgtcaggcgtgggagagcagcactgtggtattcggcggagggaccaagctgaccgtccta

SEQ ID NO: 1213 - protein, 106 aa, artificial
  VL of CDH19 14301
SYELTQPPSVSVSPGQTASITCSGDRLGEKYTCWYQQRPGQSPLLVIYQDTKRPSGIPERFSGSNSGNTATLTISGTQAMDEADYYCQAWESSTVVFGGGTKLTVL

SEQ ID NO: 1214 - DNA, 738 bp, artificial
  VH-VL of CDH19 14301
caggtgcagttggtggagtctgggggaggcgtggtccagcctgggaggtccctgagactctcctgtgcagcgtctggattcaccttcagtagctatggcatgcactgggtccgccaggctccaggcaaggggctggagtgggtggcatttatatggtatgatggaagtaataaatactatgcagactccgtgaaggaccgattcaccatctccagagacaattccaagaacacgctgtatctgcaaatgaaaagcctgagagctgaggacacggctgtgtattactgtgcgagaagggccggtataataggaactataggctactactacggtatggacgtctggggccaagggaccacggtcaccgtctctagtggtggcggaggatctggcggaggtggaagcggaggcggcggatcttcctatgaactgactcagccaccctcagtgtccgtgtccccaggacagacagccagcatcacctgctctggagataggttgggggaaaaatatacttgctggtatcagcagaggccaggccagtcccctttgctggtcatctatcaagataccaagcggccctcagggatccctgagcgattctctggctccaactctggtaacacagccactctgaccatcagcgggacccaggctatggatgaggctgactattactgtcaggcgtgggagagcagcactgtggtattcggcggagggaccaagctgaccgtccta

SEQ ID NO: 1215 - protein, 246 aa, artificial
  VH-VL of CDH19 14301
QVQLVESGGGVVQPGRSLRLSCAASGFTFSSYGMHWVRQAPGKGLEWVAFIWYDGSNKYYADSVKDRFTISRDNSKNTLYLQMKSLRAEDTAVYYCARRAGIIGTIGYYYGMDVWGQGTTVTVSSGGGGSGGGGSGGGGSSYELTQPPSVSVSPGQTASITCSGDRLGEKYTCWYQQRPGQSPLLVIYQDTKRPSGIPERFSGSNSGNTATLTISGTQAMDEADYYCQAWESSTVVFGGGTKLTVL

SEQ ID NO: 1216 - protein, 507 aa, artificial
  CDH19 14301 x I2C
QVQLVESGGGVVQPGRSLRLSCAASGFTFSSYGMHWVRQAPGKGLEWVAFIWYDGSNKYYADSVKDRFTISRDNSKNTLYLQMKSLRAEDTAVYYCARRAGIIGTIGYYYGMDVWGQGTTVTVSSGGGGSGGGGSGGGGSSYELTQPPSVSVSPGQTASITCSGDRLGEKYTCWYQQRPGQSPLLVIYQDTKRPSGIPERFSGSNSGNTATLTISGTQAMDEADYYCQAWESSTVVFGGGTKLTVLSGGGGSEVQLVESGGGLVQPGGSLKLSCAASGFTFNKYAMNWVRQAPGKGLEWVARIRSKYNNYATYYADSVKDRFTISRDDSKNTAYLQMNNLKTEDTAVYYCVRHGNFGNSYISYWAYWGQGTLVTVSSGGGGSGGGGSGGGGSQTVVTQEPSLTVSPGGTVTLTCGSSTGAVTSGNYPNWVQQKPGQAPRGLIGGTKFLAPGTPARFSGSLLGGKAALTLSGVQPEDEAEYYCVLWYSNRWVFGGGTKLTVLHHHHHH

SEQ ID NO: 1217 - protein, 5 aa, artificial
  CDR-H1 of CDH19 14079
RYGIH

SEQ ID NO: 1218 - protein, 17 aa, artificial
  CDR-H2 of CDH19 14079
VIWYEGSNKYYAESVKG

SEQ ID NO: 1219 - protein, 16 aa, artificial
  CDR-H3 of CDH19 14079
RAGIPGTTGYYYGMDV

SEQ ID NO: 1220 - protein, 11 aa, artificial
  CDR-L1 of CDH19 14079
SGDRLGEKYVS

SEQ ID NO: 1221 - protein, 7 aa, artificial
  CDR-L2 of CDH19 14079
QDNKWPS

SEQ ID NO: 1222 - protein, 9 aa, artificial
  CDR-L3 of CDH19 14079
QAWESSTVV

SEQ ID NO: 1223 - DNA, 375 bp, artificial
  VH of CDH19 14079
caggtgcagctggtggagtctgggggaggcgtggtccagcctggggggtccctgagactctcctgtgcagcgtctggattcaccttcagtcgctatggcatacactgggtccgccaggctccaggcaaggggctggagtgggtggcagttatatggtatgagggaagtaataaatactatgcagagtccgtgaagggccgattcaccatctccagagacaattccaagaacacgctgtatctgcaaatgaacagcctgagagccgaggactcggctgtgtattactgtgcgagaagggccggtatacctggaactacgggctactactatggtatggacgtctggggccaagggaccacggtcaccgtctcctca

SEQ ID NO: 1224 - protein, 125 aa, artificial; identical to SEQ ID NO: 515
  VH of CDH19 14079

SEQ ID NO: 1225 - DNA, 318 bp, artificial
  VL of CDH19 14079
tcctatgagctgactcagccaccctcagtgtccgtgtccccaggacagacagccagcatcacctgctctggagatagattgggggagaaatatgttagctggtatcagcagaagccaggccagtcccctatactggtcatctatcaagataataagtggccctcagggatccctgagcgattctctggctccaactctgggaacacagccactctgaccatcagcgggacccaggctatggatgaggctgactattactgtcaggcgtgggagagcagcactgtggtattcggcggggggaccaagctgaccgtccta

SEQ ID NO: 1226 - protein, 106 aa, artificial
  VL of CDH19 14079
SYELTQPPSVSVSPGQTASITCSGDRLGEKYVSWYQQKPGQSPILVIYQDNKWPSGIPERFSGSNSGNTATLTISGTQAMDEADYYCQAWESSTVVFGGGTKLTVL

SEQ ID NO: 1227 - DNA, 738 bp, artificial
  VH-VL of CDH19 14079
caggtgcagctggtggagtctgggggaggcgtggtccagcctggggggtccctgagactctcctgtgcagcgtctggattcaccttcagtcgctatggcatacactgggtccgccaggctccaggcaaggggctggagtgggtggcagttatatggtatgagggaagtaataaatactatgcagagtccgtgaagggccgattcaccatctccagagacaattccaagaacacgctgtatctgcaaatgaacagcctgagagccgaggactcggctgtgtattactgtgcgagaagggccggtatacctggaactacgggctactactatggtatggacgtctggggccaagggaccacggtcaccgtctcctcaggtggcggaggatctggcggaggtggaagcggaggcggcggatcttcctatgagctgactcagccaccctcagtgtccgtgtccccaggacagacagccagcatcacctgctctggagatagattgggggagaaatatgttagctggtatcagcagaagccaggccagtcccctatactggtcatctatcaagataataagtggccctcagggatccctgagcgattctctggctccaactctgggaacacagccactctgaccatcagcgggacccaggctatggatgaggctgactattactgtcaggcgtgggagagcagcactgtggtattcggcggggggaccaagctgaccgtccta

SEQ ID NO: 1228 - protein, 246 aa, artificial
  VH-VL of CDH19 14079
QVQLVESGGGVVQPGGSLRLSCAASGFTFSRYGIHWVRQAPGKGLEWVAVIWYEGSNKYYAESVKGRFTISRDNSKNTLYLQMNSLRAEDSAVYYCARRAGIPGTTGYYYGMDVWGQGTTVTVSSGGGGSGGGGSGGGGSSYELTQPPSVSVSPGQTASITCSGDRLGEKYVSWYQQKPGQSPILVIYQDNKWPSGIPERFSGSNSGNTATLTISGTQAMDEADYYCQAWESSTVVFGGGTKLTVL

SEQ ID NO: 1229 - protein, 507 aa, artificial
  CDH19 14079 x I2C
QVQLVESGGGVVQPGGSLRLSCAASGFTFSRYGIHWVRQAPGKGLEWVAVIWYEGSNKYYAESVKGRFTISRDNSKNTLYLQMNSLRAEDSAVYYCARRAGIPGTTGYYYGMDVWGQGTTVTVSSGGGGSGGGGSGGGGSSYELTQPPSVSVSPGQTASITCSGDRLGEKYVSWYQQKPGQSPILVIYQDNKWPSGIPERFSGSNSGNTATLTISGTQAMDEADYYCQAWESSTVVFGGGTKLTVLSGGGGSEVQLVESGGGLVQPGGSLKLSCAASGFTFNKYAMNWVRQAPGKGLEWVARIRSKYNNYATYYADSVKDRFTISRDDSKNTAYLQMNNLKTEDTAVYYCVRHGNFGNSYISYWAYWGQGTLVTVSSGGGGSGGGGSGGGGSQTVVTQEPSLTVSPGGTVTLTCGSSTGAVTSGNYPNWVQQKPGQAPRGLIGGTKFLAPGTPARFSGSLLGGKAALTLSGVQPEDEAEYYCVLWYSNRWVFGGGTKLTVLHHHHHH

SEQ ID NO: 1230 - protein, 5 aa, artificial
  CDR-H1 of CDH19  14077
RYGIH

SEQ ID NO: 1231 - protein, 17 aa, artificial
  CDR-H2 of CDH19 14077
VIWYDGSNKYYADSVKG

SEQ ID NO: 1232 - protein, 16 aa, artificial
  CDR-H3 of CDH19 14077
RAGIPGTTGYYYGMDV

SEQ ID NO: 1233 - protein, 11 aa, artificial
  CDR-L1 of CDH19 14077
SGDRLGEKYVS

SEQ ID NO: 1234 - protein, 7 aa, artificial
  CDR-L2 of CDH19 14077
QDNKWPS

SEQ ID NO: 1235 - protein, 9 aa, artificial
  CDR-L3 of CDH19 14077
QAWDSSTVV

SEQ ID NO: 1236 - DNA, 375 bp, artificial
  VH of CDH19 14077
caggtgcagctggtggagtctgggggaggcgtggtccagcctgggaggtccctgagactctcctgtgcagcgtctggattcaccttcagtcgctatggcatacactgggtccgccaggctccaggcaaggggctggagtgggtggcagttatatggtatgatggaagtaataaatactatgcagactccgtgaagggccgattcaccatctccagagacaattccaagaacacgctgtatctgcaaatgaacagcctgagagccgaggactcggctgtgtattactgtgcgagaagggccggtatacctggaactacgggctactactatggtatggacgtctggggccaagggaccacggtcaccgtctcctca

SEQ ID NO: 1237 - protein, 125 aa, artificial; identical to SEQ ID NO: 513
  VH of CDH19 14077

SEQ ID NO: 1238 - DNA, 318 bp, artificial; identical to SEQ ID NO: 1199
  VL of CDH19 14077

SEQ ID NO: 1239 - protein, 106 aa, artificial; identical to SEQ ID NO: 1200
  VL of CDH19 14077

SEQ ID NO: 1240 - DNA, 738 bp, artificial
  VH-VL of CDH19 14077
caggtgcagctggtggagtctgggggaggcgtggtccagcctgggaggtccctgagactctcctgtgcagcgtctggattcaccttcagtcgctatggcatacactgggtccgccaggctccaggcaaggggctggagtgggtggcagttatatggtatgatggaagtaataaatactatgcagactccgtgaagggccgattcaccatctccagagacaattccaagaacacgctgtatctgcaaatgaacagcctgagagccgaggactcggctgtgtattactgtgcgagaagggccggtatacctggaactacgggctactactatggtatggacgtctggggccaagggaccacggtcaccgtctcctcaggtggcggaggatctggcggaggtggaagcggaggcggcggatcttcctatgagctgactcagccaccctcagtgtccgtgtccccaggacagacagccagcatcacctgctctggagatagattgggggagaaatatgttagctggtatcagcagaagccaggccagtcccctatactggtcatctatcaagataataagtggccctcagggatccctgagcgattctctggctccaactctgggaacacagccactctgaccatcagcgggacccaggctatggatgaggctgactattactgtcaggcgtgggacagcagcactgtggtattcggcggggggaccaagctgaccgtccta

SEQ ID NO: 1241 - protein, 246 aa, artificial
  VH-VL of CDH19 14077
QVQLVESGGGVVQPGRSLRLSCAASGFTFSRYGIHWVRQAPGKGLEWVAVIWYDGSNKYYADSVKGRFTISRDNSKNTLYLQMNSLRAEDSAVYYCARRAGIPGTTGYYYGMDVWGQGTTVTVSSGGGGSGGGGSGGGGSSYELTQPPSVSVSPGQTASITCSGDRLGEKYVSWYQQKPGQSPILVIYQDNKWPSGIPERFSGSNSGNTATLTISGTQAMDEADYYCQAWDSSTVVFGGGTKLTVL

SEQ ID NO: 1242 - protein, 507 aa, artificial
  CDH19 14077 x I2C
QVQLVESGGGVVQPGRSLRLSCAASGFTFSRYGIHWVRQAPGKGLEWVAVIWYDGSNKYYADSVKGRFTISRDNSKNTLYLQMNSLRAEDSAVYYCARRAGIPGTTGYYYGMDVWGQGTTVTVSSGGGGSGGGGSGGGGSSYELTQPPSVSVSPGQTASITCSGDRLGEKYVSWYQQKPGQSPILVIYQDNKWPSGIPERFSGSNSGNTATLTISGTQAMDEADYYCQAWDSSTVVFGGGTKLTVLSGGGGSEVQLVESGGGLVQPGGSLKLSCAASGFTFNKYAMNWVRQAPGKGLEWVARIRSKYNNYATYYADSVKDRFTISRDDSKNTAYLQMNNLKTEDTAVYYCVRHGNFGNSYISYWAYWGQGTLVTVSSGGGGSGGGGSGGGGSQTVVTQEPSLTVSPGGTVTLTCGSSTGAVTSGNYPNWVQQKPGQAPRGLIGGTKFLAPGTPARFSGSLLGGKAALTLSGVQPEDEAEYYCVLWYSNRWVFGGGTKLTVLHHHHHH

SEQ ID NO: 1243 - protein, 5 aa, artificial
  CDR-H1 of CDH19 14096
SYYIH

SEQ ID NO: 1244 - protein, 17 aa, artificial
  CDR-H2 of CDH19 14096
IINPSGGSTRYAQKFQG

SEQ ID NO: 1245 - protein, 11 aa, artificial
  CDR-H3 of CDH19 14096
GGIQLWLHFDY

SEQ ID NO: 1246 - protein, 13 aa, artificial
  CDR-L1 of CDH19 14096
SGSSSNIGRNFVN

SEQ ID NO: 1247 - protein, 7 aa, artificial
  CDR-L2 of CDH19 14096
TNNQRPS

SEQ ID NO: 1248 - protein, 11 aa, artificial
  CDR-L3 of CDH19 14096
AAWDESLNGWV

SEQ ID NO: 1249 - DNA, 360 bp, artificial
  VH of CDH19 14096
caggtgcagctggtgcagtctggggctgaggtgaagaagcctggggcctcagtgaaggtttcctgcaaggcatctggatacaccttcaccagctactatattcactgggtgcgccaggcccctggacaaggacttgagtggatgggaataatcaaccccagtggtggtagcacaaggtacgcacagaagttccagggcagagtcaccatgaccagggacacgtccacgagcacagtctacatggagctgagcagcctgagatctgaggacacggccgtgtattactgtgcgcgagggggaatacagctatggttacattttgactactggggccagggaaccctggtcaccgtctcctca

SEQ ID NO: 1250 - protein, 120 aa, artificial; identical to SEQ ID NO: 531
  VH of CDH19 14096

SEQ ID NO: 1251 - DNA, 330 bp, artificial
  VL of CDH19 14096
cagtctgcgctgactcagccaccctcagcgactgggacccccgggcagagggtcaccatctcttgttctggaagcagctccaacatcggaaggaattttgtaaactggtatcagcagctcccaggaacggcccccaaagtcctcatttatactaataatcagcggccctcaggggtccctgaccgattctctggctccaagtctggcacctcagcctccctggccatcagtgggctccagtctgaggatgaggctgattattactgtgcagcatgggatgagagcctgaatggttgggtgttcggcggagggaccaagctgaccgtccta

SEQ ID NO: 1252 - protein, 110 aa, artificial
  VL of CDH19 14096
QSALTQPPSATGTPGQRVTISCSGSSSNIGRNFVNWYQQLPGTAPKVLIYTNNQRPSGVPDRFSGSKSGTSASLAISGLQSEDEADYYCAAWDESLNGWVFGGGTKLTVL

SEQ ID NO: 1253 - DNA, 735 bp, artificial
  VH-VL of CDH19 14096
caggtgcagctggtgcagtctggggctgaggtgaagaagcctggggcctcagtgaaggtttcctgcaaggcatctggatacaccttcaccagctactatattcactgggtgcgccaggcccctggacaaggacttgagtggatgggaataatcaaccccagtggtggtagcacaaggtacgcacagaagttccagggcagagtcaccatgaccagggacacgtccacgagcacagtctacatggagctgagcagcctgagatctgaggacacggccgtgtattactgtgcgcgagggggaatacagctatggttacattttgactactggggccagggaaccctggtcaccgtctcctcaggtggcggaggatctggcggaggtggaagcggaggcggcggatctcagtctgcgctgactcagccaccctcagcgactgggacccccgggcagagggtcaccatctcttgttctggaagcagctccaacatcggaaggaattttgtaaactggtatcagcagctcccaggaacggcccccaaagtcctcatttatactaataatcagcggccctcaggggtccctgaccgattctctggctccaagtctggcacctcagcctccctggccatcagtgggctccagtctgaggatgaggctgattattactgtgcagcatgggatgagagcctgaatggttgggtgttcggcggagggaccaagctgaccgtccta

SEQ ID NO: 1254 - protein, 245 aa, artificial
  VH-VL of CDH19 14096
QVQLVQSGAEVKKPGASVKVSCKASGYTFTSYYIHWVRQAPGQGLEWMGIINPSGGSTRYAQKFQGRVTMTRDTSTSTVYMELSSLRSEDTAVYYCARGGIQLWLHFDYWGQGTLVTVSSGGGGSGGGGSGGGGSQSALTQPPSATGTPGQRVTISCSGSSSNIGRNFVNWYQQLPGTAPKVLIYTNNQRPSGVPDRFSGSKSGTSASLAISGLQSEDEADYYCAAWDESLNGWVFGGGTKLTVL

SEQ ID NO: 1255 - protein, 506 aa, artificial
  CDH19 14096 x I2C
QVQLVQSGAEVKKPGASVKVSCKASGYTFTSYYIHWVRQAPGQGLEWMGIINPSGGSTRYAQKFQGRVTMTRDTSTSTVYMELSSLRSEDTAVYYCARGGIQLWLHFDYWGQGTLVTVSSGGGGSGGGGSGGGGSQSALTQPPSATGTPGQRVTISCSGSSSNIGRNFVNWYQQLPGTAPKVLIYTNNQRPSGVPDRFSGSKSGTSASLAISGLQSEDEADYYCAAWDESLNGWVFGGGTKLTVLSGGGGSEVQLVESGGGLVQPGGSLKLSCAASGFTFNKYAMNWVRQAPGKGLEWVARIRSKYNNYATYYADSVKDRFTISRDDSKNTAYLQMNNLKTEDTAVYYCVRHGNFGNSYISYWAYWGQGTLVTVSSGGGGSGGGGSGGGGSQTVVTQEPSLTVSPGGTVTLTCGSSTGAVTSGNYPNWVQQKPGQAPRGLIGGTKFLAPGTPARFSGSLLGGKAALTLSGVQPEDEAEYYCVLWYSNRWVFGGGTKLTVLHHHHHH

SEQ ID NO: 1256 - protein, 5 aa, artificial
  CDR-H1 of CDH19 14088
SYYMS

SEQ ID NO: 1257 - protein, 17 aa, artificial
  CDR-H2 of CDH19 14088
IIHPSGGDTTYAQKFQG

SEQ ID NO: 1258 - protein, 11 aa, artificial
  CDR-H3 of CDH19 14088
GGIKLWLHFDY

SEQ ID NO: 1259 - protein, 13 aa, artificial
  CDR-L1 of CDH19 14088
SGSRSNIGSNFVN

SEQ ID NO: 1260 - protein, 7 aa, artificial
  CDR-L2 of CDH19 14088
TNNQRPS

SEQ ID NO: 1261 - protein, 11 aa, artificial
  CDR-L3 of CDH19 14088
AVWDDSLNGWV

SEQ ID NO: 1262 - DNA, 360 bp, artificial
  VH of CDH19 14088
caggtgcagttggtgcagtctggggctgaggtgaagaagcctggggcctcagtgaaggtttcctgtaaggcatctggatacaccttcaccagctactatatgtcctgggtgcgacaggcccctggacaagggcttgagtggatgggaataatccaccctagtggtggtgacacaacctacgcacagaagttccagggcagagtcaccatgaccagggacacgtccacgagcacagtctacatggagctgagcagcctgagatctgaggacacggccgtgtattactgtgcgagaggggggataaaactatggttacattttgactattggggccagggaaccctggtcaccgtctcctca

SEQ ID NO: 1263 - protein, 120 aa, artificial; identical to SEQ ID NO: 524
  VH of CDH19 14088

SEQ ID NO: 1264 - DNA, 330 bp, artificial
  VL of CDH19 14088
cagtctgtgctgactcagccaccctcagcgtctgggacccccggacagagggtcaccatctcttgttctggaagccgctccaacatcggaagtaattttgtaaactggtaccagcagctcccaggaacggcccccaaactcctcatctatactaataatcagcggccctcaggggtccctgaccgattctctggctccaagtctggcacctcagcctccctggccatcagtgggctccagtctgaggatgaggctgattattactgtgcagtatgggatgacagcctgaatggttgggtgttcggcggagggaccaagctgaccgtccta

SEQ ID NO: 1265 - protein, 110 aa, artificial
  VL of CDH19 14088
QSVLTQPPSASGTPGQRVTISCSGSRSNIGSNFVNWYQQLPGTAPKLLIYTNNQRPSGVPDRFSGSKSGTSASLAISGLQSEDEADYYCAVWDDSLNGWVFGGGTKLTVL

SEQ ID NO: 1266 - DNA, 735 bp, artificial
  VH-VL of CDH19 14088
caggtgcagttggtgcagtctggggctgaggtgaagaagcctggggcctcagtgaaggtttcctgtaaggcatctggatacaccttcaccagctactatatgtcctgggtgcgacaggcccctggacaagggcttgagtggatgggaataatccaccctagtggtggtgacacaacctacgcacagaagttccagggcagagtcaccatgaccagggacacgtccacgagcacagtctacatggagctgagcagcctgagatctgaggacacggccgtgtattactgtgcgagaggggggataaaactatggttacattttgactattggggccagggaaccctggtcaccgtctcctcaggtggcggaggatctggcggaggtggaagcggaggcggcggatctcagtctgtgctgactcagccaccctcagcgtctgggacccccggacagagggtcaccatctcttgttctggaagccgctccaacatcggaagtaattttgtaaactggtaccagcagctcccaggaacggcccccaaactcctcatctatactaataatcagcggccctcaggggtccctgaccgattctctggctccaagtctggcacctcagcctccctggccatcagtgggctccagtctgaggatgaggctgattattactgtgcagtatgggatgacagcctgaatggttgggtgttcggcggagggaccaagctgaccgtccta

SEQ ID NO: 1267 - protein, 245 aa, artificial
  VH-VL of CDH19 14088
QVQLVQSGAEVKKPGASVKVSCKASGYTFTSYYMSWVRQAPGQGLEWMGIIHPSGGDTTYAQKFQGRVTMTRDTSTSTVYMELSSLRSEDTAVYYCARGGIKLWLHFDYWGQGTLVTVSSGGGGSGGGGSGGGGSQSVLTQPPSASGTPGQRVTISCSGSRSNIGSNFVNWYQQLPGTAPKLLIYTNNQRPSGVPDRFSGSKSGTSASLAISGLQSEDEADYYCAVWDDSLNGWVFGGGTKLTVL

SEQ ID NO: 1268 - protein, 506 aa, artificial
  CDH19 14088 x I2C
QVQLVQSGAEVKKPGASVKVSCKASGYTFTSYYMSWVRQAPGQGLEWMGIIHPSGGDTTYAQKFQGRVTMTRDTSTSTVYMELSSLRSEDTAVYYCARGGIKLWLHFDYWGQGTLVTVSSGGGGSGGGGSGGGGSQSVLTQPPSASGTPGQRVTISCSGSRSNIGSNFVNWYQQLPGTAPKLLIYTNNQRPSGVPDRFSGSKSGTSASLAISGLQSEDEADYYCAVWDDSLNGWVFGGGTKLTVLSGGGGSEVQLVESGGGLVQPGGSLKLSCAASGFTFNKYAMNWVRQAPGKGLEWVARIRSKYNNYATYYADSVKDRFTISRDDSKNTAYLQMNNLKTEDTAVYYCVRHGNFGNSYISYWAYWGQGTLVTVSSGGGGSGGGGSGGGGSQTVVTQEPSLTVSPGGTVTLTCGSSTGAVTSGNYPNWVQQKPGQAPRGLIGGTKFLAPGTPARFSGSLLGGKAALTLSGVQPEDEAEYYCVLWYSNRWVFGGGTKLTVLHHHHHH

SEQ ID NO: 1269 - protein, 5 aa, artificial
  CDR-H1 of CDH19 14085
SYYMS

SEQ ID NO: 1270 - protein, 17 aa, artificial
  CDR-H2 of CDH19 14085
IIHPSGGDTTYAQKFQG

SEQ ID NO: 1271 - protein, 11 aa, artificial
  CDR-H3 of CDH19 14085
GGIKLWLHFDY

SEQ ID NO: 1272 - protein, 13 aa, artificial
  CDR-L1 of CDH19 14085
SGSRSNIGSNFVN

SEQ ID NO: 1273 - protein, 7 aa, artificial
  CDR-L2 of CDH19 14085
TNNQRPS

SEQ ID NO: 1274 - protein, 11 aa, artificial
  CDR-L3 of CDH19 14085
AVYDDSLNGWV

SEQ ID NO: 1275 - DNA, 360 bp, artificial; identical to SEQ ID NO: 371
  VH of CDH19 14085

SEQ ID NO: 1276 - protein, 120 aa, artificial; identical to SEQ ID NO: 372
  VH of CDH19 14085

SEQ ID NO: 1277 - DNA, 330 bp, artificial
  VL of CDH19 14085
cagtctgtgctgactcagccaccctcagcgtctgggacccccggacagagggtcaccatctcttgttctggaagccgctccaacatcggaagtaattttgtaaactggtaccagcagctcccaggaacggcccccaaactcctcatctatactaataatcagcggccctcaggggtccctgaccgattctctggctccaagtctggcacctcagcctccctggccatcagtgggctccagtctgaggatgaggctgattattactgtgcagtatacgatgacagcctgaatggttgggtgttcggcggagggaccaagctgaccgtccta

SEQ ID NO: 1278 - protein, 110 aa, artificial
  VL of CDH19 14085
QSVLTQPPSASGTPGQRVTISCSGSRSNIGSNFVNWYQQLPGTAPKLLIYTNNQRPSGVPDRFSGSKSGTSASLAISGLQSEDEADYYCAVYDDSLNGWVFGGGTKLTVL

SEQ ID NO: 1279 - protein, 735 aa, artificial
  VH-VL of CDH19 14085
CAGGTGCAGTTGGTGCAGTCTGGGGCTGAGGTGAAGAAGCCTGGGGCCTCAGTGAAGGTTTCCTGTAAGGCATCTAGATACACCTTCACCAGCTACTATATGTCCTGGGTGCGACAGGCCCCTGGACAAGGGCTTGAGTGGATGGGAATAATCCACCCTAGTGGTGGTGACACAACCTACGCACAGAAGTTCCAGGGCAGAGTCACCATGACCGGGGACACGTCCACGAGCACAGTCTACATGGAGCTGAGCAGCCTGAGATCTGAGGACACGGCCGTGTATTACTGTGCGAGAGGGGGGATAAAACTATGGTTACATTTTGACTATTGGGGCCAGGGAACCCTGGTCACCGTCTCCTCAGGTGGCGGAGGATCTGGCGGAGGTGGAAGCGGAGGCGGCGGATCTCAGTCTGTGCTGACTCAGCCACCCTCAGCGTCTGGGACCCCCGGACAGAGGGTCACCATCTCTTGTTCTGGAAGCCGCTCCAACATCGGAAGTAATTTTGTAAACTGGTACCAGCAGCTCCCAGGAACGGCCCCCAAACTCCTCATCTATACTAATAATCAGCGGCCCTCAGGGGTCCCTGACCGATTCTCTGGCTCCAAGTCTGGCACCTCAGCCTCCCTGGCCATCAGTGGGCTCCAGTCTGAGGATGAGGCTGATTATTACTGTGCAGTATACGATGACAGCCTGAATGGTTGGGTGTTCGGCGGAGGGACCAAGCTGACCGTCCTA

SEQ ID NO: 1280 - protein, 245 aa, artificial
  VH-VL of CDH19 14085
QVQLVQSGAEVKKPGASVKVSCKASRYTFTSYYMSWVRQAPGQGLEWMGIIHPSGGDTTYAQKFQGRVTMTGDTSTSTVYMELSSLRSEDTAVYYCARGGIKLWLHFDYWGQGTLVTVSSGGGGSGGGGSGGGGSQSVLTQPPSASGTPGQRVTISCSGSRSNIGSNFVNWYQQLPGTAPKLLIYTNNQRPSGVPDRFSGSKSGTSASLAISGLQSEDEADYYCAVYDDSLNGWVFGGGTKLTVL

SEQ ID NO: 1281 - protein, 506 aa, artificial
  CDH19 14085 x I2C
QVQLVQSGAEVKKPGASVKVSCKASRYTFTSYYMSWVRQAPGQGLEWMGIIHPSGGDTTYAQKFQGRVTMTGDTSTSTVYMELSSLRSEDTAVYYCARGGIKLWLHFDYWGQGTLVTVSSGGGGSGGGGSGGGGSQSVLTQPPSASGTPGQRVTISCSGSRSNIGSNFVNWYQQLPGTAPKLLIYTNNQRPSGVPDRFSGSKSGTSASLAISGLQSEDEADYYCAVYDDSLNGWVFGGGTKLTVLSGGGGSEVQLVESGGGLVQPGGSLKLSCAASGFTFNKYAMNWVRQAPGKGLEWVARIRSKYNNYATYYADSVKDRFTISRDDSKNTAYLQMNNLKTEDTAVYYCVRHGNFGNSYISYWAYWGQGTLVTVSSGGGGSGGGGSGGGGSQTVVTQEPSLTVSPGGTVTLTCGSSTGAVTSGNYPNWVQQKPGQAPRGLIGGTKFLAPGTPARFSGSLLGGKAALTLSGVQPEDEAEYYCVLWYSNRWVFGGGTKLTVLHHHHHH

SEQ ID NO: 1282 - protein, 5 aa, artificial
  CDR-H1 of CDH19 14074
SYFIH

SEQ ID NO: 1283 - protein, 17 aa, artificial
  CDR-H2 of CDH19 14074
IINPISVSTSYAQKFQG

SEQ ID NO: 1284 - protein, 11 aa, artificial
  CDR-H3 of CDH19 14074
GGIQLWLHLDY

SEQ ID NO: 1285 - protein, 13 aa, artificial
  CDR-L1 of CDH19 14074
SGSRSNIGSNFVN

SEQ ID NO: 1286 - protein, 7 aa, artificial
  CDR-L2 of CDH19 14074
TNNQRPS

SEQ ID NO: 1287 - protein, 11 aa, artificial
  CDR-L3 of CDH19 14074
ATWDDSMNGWV

SEQ ID NO: 1288 - DNA, 360 bp, artificial; identical to SEQ ID NO: 367
  VH of CDH19 14074

SEQ ID NO: 1289 - protein, 120 aa, artificial; identical to SEQ ID NO: 368
  VH of CDH19 14074

SEQ ID NO: 1290 - DNA, 330 bp, artificial
  VL of CDH19 14074
cagtctgcgctgactcagccaccctcagtgactgggacccccgggcagagggtcaccatctcttgttctggaagcaggtccaacatcggaagcaattttgtaaactggtaccagcagctcccaggaacggcccccaaagtcctcatctatactaataatcagcggccctcaggggtccctgaccgattctctggctccaagtctggcacctcagcctccctggccatcagtgggctccagtctgaggatgaggctgattattactgcgcaacatgggatgacagtatgaatggttgggtgttcggcggagggaccaaactgaccgtccta

SEQ ID NO: 1291 - protein, 110 aa, artificial
  VL of CDH19 14074
QSALTQPPSVTGTPGQRVTISCSGSRSNIGSNFVNWYQQLPGTAPKVLIYTNNQRPSGVPDRFSGSKSGTSASLAISGLQSEDEADYYCATWDDSMNGWVFGGGTKLTVL

SEQ ID NO: 1292 - DNA, 735 bp, artificial
  VH-VL of CDH19 14074
caggtgcagttggtgcagtctggggctgaggtgaagaagcctggggcctcagtgaaggtttcctgcaaggtttctggatacaccttcaccagctactttattcactgggtgcgccaggcccctggacaagggcttgaatggatgggaattatcaaccctattagtgttagcacaagctacgcacagaagttccagggcagagtcaccatgaccagggacacgtccacgagcacagtcttcatggagctgagcagcctgagatctgaggacacggccgtgtattactgtgcgcgaggggggatacagctatggttacatttggactactggggccagggaaccctggtcaccgtctcctcaggtggcggaggatctggcggaggtggaagcggaggcggcggatctcagtctgcgctgactcagccaccctcagtgactgggacccccgggcagagggtcaccatctcttgttctggaagcaggtccaacatcggaagcaattttgtaaactggtaccagcagctcccaggaacggcccccaaagtcctcatctatactaataatcagcggccctcaggggtccctgaccgattctctggctccaagtctggcacctcagcctccctggccatcagtgggctccagtctgaggatgaggctgattattactgcgcaacatgggatgacagtatgaatggttgggtgttcggcggagggaccaaactgaccgtccta

SEQ ID NO: 1293 - protein, 245 aa, artificial
  VH-VL of CDH19 14074
QVQLVQSGAEVKKPGASVKVSCKVSGYTFTSYFIHWVRQAPGQGLEWMGIINPISVSTSYAQKFQGRVTMTRDTSTSTVFMELSSLRSEDTAVYYCARGGIQLWLHLDYWGQGTLVTVSSGGGGSGGGGSGGGGSQSALTQPPSVTGTPGQRVTISCSGSRSNIGSNFVNWYQQLPGTAPKVLIYTNNQRPSGVPDRFSGSKSGTSASLAISGLQSEDEADYYCATWDDSMNGWVFGGGTKLTVL

SEQ ID NO: 1294 - protein, 506 aa, artificial
  CDH19 14074 x I2C
QVQLVQSGAEVKKPGASVKVSCKVSGYTFTSYFIHWVRQAPGQGLEWMGIINPISVSTSYAQKFQGRVTMTRDTSTSTVFMELSSLRSEDTAVYYCARGGIQLWLHLDYWGQGTLVTVSSGGGGSGGGGSGGGGSQSALTQPPSVTGTPGQRVTISCSGSRSNIGSNFVNWYQQLPGTAPKVLIYTNNQRPSGVPDRFSGSKSGTSASLAISGLQSEDEADYYCATWDDSMNGWVFGGGTKLTVLSGGGGSEVQLVESGGGLVQPGGSLKLSCAASGFTFNKYAMNWVRQAPGKGLEWVARIRSKYNNYATYYADSVKDRFTISRDDSKNTAYLQMNNLKTEDTAVYYCVRHGNFGNSYISYWAYWGQGTLVTVSSGGGGSGGGGSGGGGSQTVVTQEPSLTVSPGGTVTLTCGSSTGAVTSGNYPNWVQQKPGQAPRGLIGGTKFLAPGTPARFSGSLLGGKAALTLSGVQPEDEAEYYCVLWYSNRWVFGGGTKLTVLHHHHHH

SEQ ID NO: 1295 - protein, 5 aa, artificial
  CDR-H1 of CDH19  14075
SYFIH

SEQ ID NO: 1296 - protein, 17 aa, artificial
  CDR-H2 of CDH19 14075
IINPISVSTSYAQKFQG

SEQ ID NO: 1297 - protein, 11 aa, artificial
  CDR-H3 of CDH19 14075
GGIQLWLHLDY

SEQ ID NO: 1298 - protein, 13 aa, artificial
  CDR-L1 of CDH19 14075
SGSRSNIGSNFVN

SEQ ID NO: 1299 - protein, 7 aa, artificial
  CDR-L2 of CDH19 14075
TNNQRPS

SEQ ID NO: 1300 - protein, 11 aa, artificial
  CDR-L3 of CDH19 14075
ATWDESMQGWV

SEQ ID NO: 1301 - DNA, 360 bp, artificial; identical to SEQ ID NO: 367
  VH of CDH19 14075

SEQ ID NO: 1302 - protein, 120 aa, artificial; identical to SEQ ID NO: 368
  VH of CDH19 14075

SEQ ID NO: 1303 - DNA, 330 bp, artificial
  VL of CDH19  14075
cagtctgcgctgactcagccaccctcagtgactgggacccccgggcagagggtcaccatctcttgttctggaagcaggtccaacatcggaagcaattttgtaaactggtaccagcagctcccaggaacggcccccaaagtcctcatctatactaataatcagcggccctcaggggtccctgaccgattctctggctccaagtctggcacctcagcctccctggccatcagtgggctccagtctgaggatgaggctgattattactgcgcaacatgggatgagagtatgcagggttgggtgttcggcggagggaccaaactgaccgtccta

SEQ ID NO: 1304 - protein, 110 aa, artificial
  VL of CDH19  14075
QSALTQPPSVTGTPGQRVTISCSGSRSNIGSNFVNWYQQLPGTAPKVLIYTNNQRPSGVPDRFSGSKSGTSASLAISGLQSEDEADYYCATWDESMQGWVFGGGTKLTVL

SEQ ID NO: 1305 - DNA, 735 bp, artificial
  VH-VL of CDH19  14075
caggtgcagttggtgcagtctggggctgaggtgaagaagcctggggcctcagtgaaggtttcctgcaaggtttctggatacaccttcaccagctactttattcactgggtgcgccaggcccctggacaagggcttgaatggatgggaattatcaaccctattagtgttagcacaagctacgcacagaagttccagggcagagtcaccatgaccagggacacgtccacgagcacagtcttcatggagctgagcagcctgagatctgaggacacggccgtgtattactgtgcgcgaggggggatacagctatggttacatttggactactggggccagggaaccctggtcaccgtctcctcaggtggcggaggatctggcggaggtggaagcggaggcggcggatctcagtctgcgctgactcagccaccctcagtgactgggacccccgggcagagggtcaccatctcttgttctggaagcaggtccaacatcggaagcaattttgtaaactggtaccagcagctcccaggaacggcccccaaagtcctcatctatactaataatcagcggccctcaggggtccctgaccgattctctggctccaagtctggcacctcagcctccctggccatcagtgggctccagtctgaggatgaggctgattattactgcgcaacatgggatgagagtatgcagggttgggtgttcggcggagggaccaaactgaccgtccta

SEQ ID NO: 1306 - protein, 245 aa, artificial
  VH-VL of CDH19  14075
QVQLVQSGAEVKKPGASVKVSCKVSGYTFTSYFIHWVRQAPGQGLEWMGIINPISVSTSYAQKFQGRVTMTRDTSTSTVFMELSSLRSEDTAVYYCARGGIQLWLHLDYWGQGTLVTVSSGGGGSGGGGSGGGGSQSALTQPPSVTGTPGQRVTISCSGSRSNIGSNFVNWYQQLPGTAPKVLIYTNNQRPSGVPDRFSGSKSGTSASLAISGLQSEDEADYYCATWDESMQGWVFGGGTKLTVL

SEQ ID NO: 1307 - protein, 506 aa, artificial
  CDH19 14075 x I2C
QVQLVQSGAEVKKPGASVKVSCKVSGYTFTSYFIHWVRQAPGQGLEWMGIINPISVSTSYAQKFQGRVTMTRDTSTSTVFMELSSLRSEDTAVYYCARGGIQLWLHLDYWGQGTLVTVSSGGGGSGGGGSGGGGSQSALTQPPSVTGTPGQRVTISCSGSRSNIGSNFVNWYQQLPGTAPKVLIYTNNQRPSGVPDRFSGSKSGTSASLAISGLQSEDEADYYCATWDESMQGWVFGGGTKLTVLSGGGGSEVQLVESGGGLVQPGGSLKLSCAASGFTFNKYAMNWVRQAPGKGLEWVARIRSKYNNYATYYADSVKDRFTISRDDSKNTAYLQMNNLKTEDTAVYYCVRHGNFGNSYISYWAYWGQGTLVTVSSGGGGSGGGGSGGGGSQTVVTQEPSLTVSPGGTVTLTCGSSTGAVTSGNYPNWVQQKPGQAPRGLIGGTKFLAPGTPARFSGSLLGGKAALTLSGVQPEDEAEYYCVLWYSNRWVFGGGTKLTVLHHHHHH

SEQ ID NO: 1308 - protein, 5 aa, artificial
  CDR-H1 of CDH19 14024
SSGYY

SEQ ID NO: 1309 - protein, 16 aa, artificial
  CDR-H2 of CDH19 14024
YIYYTGSAYYNPSLKS

SEQ ID NO: 1310 - protein, 10 aa, artificial
  CDR-H3 of CDH19 14024
DGSSGWYFQY

SEQ ID NO: 1311 - protein, 12 aa, artificial
  CDR-L1 of CDH19 14024
RASRQISSSYLA

SEQ ID NO: 1312 - protein, 7 aa, artificial
  CDR-L2 of CDH19 14024
GPSSRAT

SEQ ID NO: 1313 - protein, 8 aa, artificial
  CDR-L3 of CDH19 14024
QQYGSSFT

SEQ ID NO: 1314 - DNA, 360 bp, artificial
  VH of CDH19 14024
caggtgcagctgcaggagtcgggcccaggactggtgaagccttcagagaccctgtccctcacctgcactgtctctggtggctccatcagcagtagtggttactactggagctggatccgccagcccccagggaagggcctggagtggattgggtacatctattacactgggagcgcctactacaacccgtccctcaagagtcgagttaccatatcagtagacacgtctaagaaccagttctccctgaagctgagctctgtgactgccgcggacacggccgtgtattactgtgcgagagatggaagcagtggctggtacttccagtattggggccagggcaccctggtcaccgtctctagt

SEQ ID NO: 1315 - protein, 120 aa, artificial; identical to SEQ ID NO: 464
  VH of CDH19 14024

SEQ ID NO: 1316 - DNA, 321 bp, artificial
  VL of CDH19 14024
gaaattgtgttgacgcagtctccaggcaccctgtctttgtctccaggggaaagagccaccctctcctgcagggccagtcggcagattagcagcagctacttagcctggtaccagcagaaacctggccaggctcccaggctcctcatctatggtccatccagcagggccactggcatcccagacaggttcagtggcagtgggtctgggacagacttcactctcaccatcagcagactggagcctgaagattttgcagtgtattactgtcagcagtatggtagctcattcactttcggccaggggaccaaagtggatatcaaa

SEQ ID NO: 1317 - protein, 107 aa, artificial
  VL of CDH19 14024
EIVLTQSPGTLSLSPGERATLSCRASRQISSSYLAWYQQKPGQAPRLLIYGPSSRATGIPDRFSGSGSGTDFTLTISRLEPEDFAVYYCQQYGSSFTFGQGTKVDIK

SEQ ID NO: 1318 - DNA, 726 bp, artificial
  VH-VL of CDH19
caggtgcagctgcaggagtcgggcccaggactggtgaagccttcagagaccctgtccctcacctgcactgtctctggtggctccatcagcagtagtggttactactggagctggatccgccagcccccagggaagggcctggagtggattgggtacatctattacactgggagcgcctactacaacccgtccctcaagagtcgagttaccatatcagtagacacgtctaagaaccagttctccctgaagctgagctctgtgactgccgcggacacggccgtgtattactgtgcgagagatggaagcagtggctggtacttccagtattggggccagggcaccctggtcaccgtctctagtggtggcggaggatctggcggaggtggaagcggaggcggcggatctgaaattgtgttgacgcagtctccaggcaccctgtctttgtctccaggggaaagagccaccctctcctgcagggccagtcggcagattagcagcagctacttagcctggtaccagcagaaacctggccaggctcccaggctcctcatctatggtccatccagcagggccactggcatcccagacaggttcagtggcagtgggtctgggacagacttcactctcaccatcagcagactggagcctgaagattttgcagtgtattactgtcagcagtatggtagctcattcactttcggccaggggaccaaagtggatatcaaa

SEQ ID NO: 1319 - protein, 242 aa, artificial
  VH-VL of CDH19
QVQLQESGPGLVKPSETLSLTCTVSGGSISSSGYYWSWIRQPPGKGLEWIGYIYYTGSAYYNPSLKSRVTISVDTSKNQFSLKLSSVTAADTAVYYCARDGSSGWYFQYWGQGTLVTVSSGGGGSGGGGSGGGGSEIVLTQSPGTLSLSPGERATLSCRASRQISSSYLAWYQQKPGQAPRLLIYGPSSRATGIPDRFSGSGSGTDFTLTISRLEPEDFAVYYCQQYGSSFTFGQGTKVDIK

SEQ ID NO: 1320 - protein, 503 aa, artificial
  CDH19 14024 x I2C
QVQLQESGPGLVKPSETLSLTCTVSGGSISSSGYYWSWIRQPPGKGLEWIGYIYYTGSAYYNPSLKSRVTISVDTSKNQFSLKLSSVTAADTAVYYCARDGSSGWYFQYWGQGTLVTVSSGGGGSGGGGSGGGGSEIVLTQSPGTLSLSPGERATLSCRASRQISSSYLAWYQQKPGQAPRLLIYGPSSRATGIPDRFSGSGSGTDFTLTISRLEPEDFAVYYCQQYGSSFTFGQGTKVDIKSGGGGSEVQLVESGGGLVQPGGSLKLSCAASGFTFNKYAMNWVRQAPGKGLEWVARIRSKYNNYATYYADSVKDRFTISRDDSKNTAYLQMNNLKTEDTAVYYCVRHGNFGNSYISYWAYWGQGTLVTVSSGGGGSGGGGSGGGGSQTVVTQEPSLTVSPGGTVTLTCGSSTGAVTSGNYPNWVQQKPGQAPRGLIGGTKFLAPGTPARFSGSLLGGKAALTLSGVQPEDEAEYYCVLWYSNRWVFGGGTKLTVLHHHHHH

SEQ ID NO: 1321 - protein, 5 aa, artificial
  CDR-H1 of CDH19 14054
SYDMH

SEQ ID NO: 1322 - protein, 17 aa, artificial
  CDR-H2 of CDH19 14054
VISYDGTNEYYADSVKG

SEQ ID NO: 1323 - protein, 10 aa, artificial
  CDR-H3 of CDH19 14054
ERYFDWSFDY

SEQ ID NO: 1324 - protein, 12 aa, artificial
  CDR-L1 of CDH19 14054
RASQSVSNTYLA

SEQ ID NO: 1325 - protein, 7 aa, artificial
  CDR-L2 of CDH19 14054
GASSRAT

SEQ ID NO: 1326 - protein, 8 aa, artificial
  CDR-L3 of CDH19 14054
QQYSNSWT

SEQ ID NO: 1327 - DNA, 357 bp, artificial
  VH of CDH19 14054
caggtgcagctggtggagtctgggggaggcgtggtccagcctggggggtccctgagactctcctgtgcagcctctggattcaccttcagtagctatgacatgcactgggtccgccaggctccaggcaaggggctggagtgggtggcagttatatcatatgatggaactaatgaatactatgcagactccgtgaagggccgattcaccatctccagagacacttccaagaacacgctgtatttgcaaatgaacagcctgagagctgaggacacggctgtatattactgtgcgagagaacgatattttgactggtcttttgactactggggccagggaaccctggtcagcgtctctagt

SEQ ID NO: 1328 - protein, 119 aa, artificial; identical to SEQ ID NO: 490
  VH of CDH19 14054

SEQ ID NO: 1329 - DNA, 321 bp, artificial
  VL of CDH19 14054
gaaattgtattgacgcagtctccaggcaccctgtctttgtctccaggggaaagagccaccctctcctgcagggccagtcagagtgttagcaacacctacttagcctggtaccagcagagacctggccaggctcccaggctcctcatctatggtgcatccagcagggccactggcatcccagacagattcagtggcagtgggtctgggacagacttcactctcaccatcagcagtctggagcctgaagattttgcagtgtattactgtcagcagtacagtaactcgtggacgttcggccaagggaccaaggtggaaatcaaa

SEQ ID NO: 1330 - protein, 107 aa, artificial
  VL of CDH19 14054
EIVLTQSPGTLSLSPGERATLSCRASQSVSNTYLAWYQQRPGQAPRLLIYGASSRATGIPDRFSGSGSGTDFTLTISSLEPEDFAVYYCQQYSNSWTFGQGTKVEIK

SEQ ID NO: 1331 - DNA, 723 bp, artificial
  VH-VL of CDH19 14054
caggtgcagctggtggagtctgggggaggcgtggtccagcctggggggtccctgagactctcctgtgcagcctctggattcaccttcagtagctatgacatgcactgggtccgccaggctccaggcaaggggctggagtgggtggcagttatatcatatgatggaactaatgaatactatgcagactccgtgaagggccgattcaccatctccagagacacttccaagaacacgctgtatttgcaaatgaacagcctgagagctgaggacacggctgtatattactgtgcgagagaacgatattttgactggtcttttgactactggggccagggaaccctggtcagcgtctctagtggtggcggaggatctggcggaggtggaagcggaggcggcggatctgaaattgtattgacgcagtctccaggcaccctgtctttgtctccaggggaaagagccaccctctcctgcagggccagtcagagtgttagcaacacctacttagcctggtaccagcagagacctggccaggctcccaggctcctcatctatggtgcatccagcagggccactggcatcccagacagattcagtggcagtgggtctgggacagacttcactctcaccatcagcagtctggagcctgaagattttgcagtgtattactgtcagcagtacagtaactcgtggacgttcggccaagggaccaaggtggaaatcaaa

SEQ ID NO: 1332 - protein, 241 aa, artificial
  VH-VL of CDH19 14054
QVQLVESGGGVVQPGGSLRLSCAASGFTFSSYDMHWVRQAPGKGLEWVAVISYDGTNEYYADSVKGRFTISRDTSKNTLYLQMNSLRAEDTAVYYCARERYFDWSFDYWGQGTLVSVSSGGGGSGGGGSGGGGSEIVLTQSPGTLSLSPGERATLSCRASQSVSNTYLAWYQQRPGQAPRLLIYGASSRATGIPDRFSGSGSGTDFTLTISSLEPEDFAVYYCQQYSNSWTFGQGTKVEIK

SEQ ID NO: 1333 - protein, 502 aa, artificial
  CDH19 14054 x I2C
QVQLVESGGGVVQPGGSLRLSCAASGFTFSSYDMHWVRQAPGKGLEWVAVISYDGTNEYYADSVKGRFTISRDTSKNTLYLQMNSLRAEDTAVYYCARERYFDWSFDYWGQGTLVSVSSGGGGSGGGGSGGGGSEIVLTQSPGTLSLSPGERATLSCRASQSVSNTYLAWYQQRPGQAPRLLIYGASSRATGIPDRFSGSGSGTDFTLTISSLEPEDFAVYYCQQYSNSWTFGQGTKVEIKSGGGGSEVQLVESGGGLVQPGGSLKLSCAASGFTFNKYAMNWVRQAPGKGLEWVARIRSKYNNYATYYADSVKDRFTISRDDSKNTAYLQMNNLKTEDTAVYYCVRHGNFGNSYISYWAYWGQGTLVTVSSGGGGSGGGGSGGGGSQTVVTQEPSLTVSPGGTVTLTCGSSTGAVTSGNYPNWVQQKPGQAPRGLIGGTKFLAPGTPARFSGSLLGGKAALTLSGVQPEDEAEYYCVLWYSNRWVFGGGTKLTVLHHHHHH

SEQ ID NO: 1334 - protein, 5 aa, artificial
  CDR-H1 of CDH19 14056
GYYWS

SEQ ID NO: 1335 - protein, 16 aa, artificial
  CDR-H2 of CDH19 14056
YFSYSGSTNYNPSLKS

SEQ ID NO: 1336 - protein, 8 aa, artificial
  CDR-H3 of CDH19 14056
NWAFHFDF

SEQ ID NO: 1337 - protein, 14 aa, artificial
  CDR-L1 of CDH19 14056
TGSSSNIGTGYAVH

SEQ ID NO: 1338 - protein, 7 aa, artificial
  CDR-L2 of CDH19 14056
GNNNRPS

SEQ ID NO: 1339 - protein, 11 aa, artificial
  CDR-L3 of CDH19 14056
QSYDSRLSGWV

SEQ ID NO: 1340 - DNA, 348 bp, artificial
  VH of CDH19 14056
caggtgcagctgcaggagtcgggcccaggactggtgaagccttcggagaccctgtccctcacctgcactgtctctggtggctccatcagtggttactactggagctggatccggcagcccccaggaaagggactggagtggtttgcatatttctcttacagtgggagcaccaactacaacccctccctcaagagtcgagtcaccttatcagtagacacgtccaagaaccagttctccctgaagctgagctctgtgaccgctgcggacacggccgtgtattactgtgcgaggaactgggccttccactttgacttctggggccagggaaccctggtcaccgtctctagt

SEQ ID NO: 1341 - protein, 116 aa, artificial; identical to SEQ ID NO: 362
  VH of CDH19 14056

SEQ ID NO: 1342 - DNA, 333 bp, artificial
  VL of CDH19 14056
cagtctgtgctgacgcagccgccctcagtgtctggggccccaggacagagggtcaccatctcctgcactgggagcagctccaacatcgggacaggttatgctgtacactggtaccagcagcttccaggaacagcccccaaactcctcatctatggtaacaacaatcggccctcaggggttcctgaccgattctctggctccaagtctggcacctcagcctccctggccatcactgggctccaggctgaggatgaggctgattattactgccagtcctatgacagcagactgagtggttgggtgttcggcggagggaccaagctgaccgtccta

SEQ ID NO: 1343 - protein, 111 aa, artificial
  VL of CDH19 14056
QSVLTQPPSVSGAPGQRVTISCTGSSSNIGTGYAVHWYQQLPGTAPKLLIYGNNNRPSGVPDRFSGSKSGTSASLAITGLQAEDEADYYCQSYDSRLSGWVFGGGTKLTVL

SEQ ID NO: 1344 - DNA, 726 bp, artificial
  VH-VL of CDH19 14056
caggtgcagctgcaggagtcgggcccaggactggtgaagccttcggagaccctgtccctcacctgcactgtctctggtggctccatcagtggttactactggagctggatccggcagcccccaggaaagggactggagtggtttgcatatttctcttacagtgggagcaccaactacaacccctccctcaagagtcgagtcaccttatcagtagacacgtccaagaaccagttctccctgaagctgagctctgtgaccgctgcggacacggccgtgtattactgtgcgaggaactgggccttccactttgacttctggggccagggaaccctggtcaccgtctctagtggtggcggaggatctggcggaggtggaagcggaggcggcggatctcagtctgtgctgacgcagccgccctcagtgtctggggccccaggacagagggtcaccatctcctgcactgggagcagctccaacatcgggacaggttatgctgtacactggtaccagcagcttccaggaacagcccccaaactcctcatctatggtaacaacaatcggccctcaggggttcctgaccgattctctggctccaagtctggcacctcagcctccctggccatcactgggctccaggctgaggatgaggctgattattactgccagtcctatgacagcagactgagtggttgggtgttcggcggagggaccaagctgaccgtccta

SEQ ID NO: 1345 - protein, 242 aa, artificial
  VH-VL of CDH19 14056
QVQLQESGPGLVKPSETLSLTCTVSGGSISGYYWSWIRQPPGKGLEWFAYFSYSGSTNYNPSLKSRVTLSVDTSKNQFSLKLSSVTAADTAVYYCARNWAFHFDFWGQGTLVTVSSGGGGSGGGGSGGGGSQSVLTQPPSVSGAPGQRVTISCTGSSSNIGTGYAVHWYQQLPGTAPKLLIYGNNNRPSGVPDRFSGSKSGTSASLAITGLQAEDEADYYCQSYDSRLSGWVFGGGTKLTVL

SEQ ID NO: 1346 - protein, 503 aa, artificial
  CDH19 14056 x I2C
QVQLQESGPGLVKPSETLSLTCTVSGGSISGYYWSWIRQPPGKGLEWFAYFSYSGSTNYNPSLKSRVTLSVDTSKNQFSLKLSSVTAADTAVYYCARNWAFHFDFWGQGTLVTVSSGGGGSGGGGSGGGGSQSVLTQPPSVSGAPGQRVTISCTGSSSNIGTGYAVHWYQQLPGTAPKLLIYGNNNRPSGVPDRFSGSKSGTSASLAITGLQAEDEADYYCQSYDSRLSGWVFGGGTKLTVLSGGGGSEVQLVESGGGLVQPGGSLKLSCAASGFTFNKYAMNWVRQAPGKGLEWVARIRSKYNNYATYYADSVKDRFTISRDDSKNTAYLQMNNLKTEDTAVYYCVRHGNFGNSYISYWAYWGQGTLVTVSSGGGGSGGGGSGGGGSQTVVTQEPSLTVSPGGTVTLTCGSSTGAVTSGNYPNWVQQKPGQAPRGLIGGTKFLAPGTPARFSGSLLGGKAALTLSGVQPEDEAEYYCVLWYSNRWVFGGGTKLTVLHHHHHH

SEQ ID NO: 1347 - protein, 5 aa, artificial
  CDR-H1 of CDH19 14057
GYYWS

SEQ ID NO: 1348 - protein, 16 aa, artificial
  CDR-H2 of CDH19 14057
YFSYSGSTNYNPSLKS

SEQ ID NO: 1349 - protein, 8 aa, artificial
  CDR-H3 of CDH19 14057
NWAFHFDF

SEQ ID NO: 1350 - protein, 14 aa, artificial
  CDR-L1 of CDH19 14057
TGSSSNIGTGYAVH

SEQ ID NO: 1351 - protein, 7 aa, artificial
  CDR-L2 of CDH19 14057
GNNNRPS

SEQ ID NO: 1352 - protein, 11 aa, artificial
  CDR-L3 of CDH19 14057
QSYDSRLSGWV

SEQ ID NO: 1353 - DNA, 348 bp, artificial
  VH of CDH19 14057
caggtgcagctgcaggagtcgggcccaggactggtgaagccttcggagaccctgtccctcacctgcactgtctctggtggctccatcagtggttactactggagctggatccggcagcccccaggaaagggactggagtggattggatatttctcttacagtgggagcaccaactacaacccctccctcaagagtcgagtcaccttatcagtagacacgtccaagaaccagttctccctgaagctgagctctgtgaccgctgcggacacggccgtgtattactgtgcgaggaactgggccttccactttgacttctggggccagggaaccctggtcaccgtctctagt

SEQ ID NO: 1354 - protein, 116 aa, artificial; identical to SEQ ID NO: 493
  VH of CDH19 14057

SEQ ID NO: 1355 - DNA, 333 bp, artificial; identical to SEQ ID NO: 1342
  VL of CDH19 14057

SEQ ID NO: 1356 - protein, 111 aa, artificial; identical to SEQ ID NO: 1343
  VL of CDH19 14057

SEQ ID NO: 1357 - DNA, 726 bp, artificial
  VH-VL of CDH19 14057
caggtgcagctgcaggagtcgggcccaggactggtgaagccttcggagaccctgtccctcacctgcactgtctctggtggctccatcagtggttactactggagctggatccggcagcccccaggaaagggactggagtggattggatatttctcttacagtgggagcaccaactacaacccctccctcaagagtcgagtcaccttatcagtagacacgtccaagaaccagttctccctgaagctgagctctgtgaccgctgcggacacggccgtgtattactgtgcgaggaactgggccttccactttgacttctggggccagggaaccctggtcaccgtctctagtggtggcggaggatctggcggaggtggaagcggaggcggcggatctcagtctgtgctgacgcagccgccctcagtgtctggggccccaggacagagggtcaccatctcctgcactgggagcagctccaacatcgggacaggttatgctgtacactggtaccagcagcttccaggaacagcccccaaactcctcatctatggtaacaacaatcggccctcaggggttcctgaccgattctctggctccaagtctggcacctcagcctccctggccatcactgggctccaggctgaggatgaggctgattattactgccagtcctatgacagcagactgagtggttgggtgttcggcggagggaccaagctgaccgtccta

SEQ ID NO: 1358 - protein, 242 aa, artificial
  VH-VL of CDH19 14057
QVQLQESGPGLVKPSETLSLTCTVSGGSISGYYWSWIRQPPGKGLEWIGYFSYSGSTNYNPSLKSRVTLSVDTSKNQFSLKLSSVTAADTAVYYCARNWAFHFDFWGQGTLVTVSSGGGGSGGGGSGGGGSQSVLTQPPSVSGAPGQRVTISCTGSSSNIGTGYAVHWYQQLPGTAPKLLIYGNNNRPSGVPDRFSGSKSGTSASLAITGLQAEDEADYYCQSYDSRLSGWVFGGGTKLTVL

SEQ ID NO: 1359 - protein, 503 aa, artificial
  CDH19 14057 x I2C
QVQLQESGPGLVKPSETLSLTCTVSGGSISGYYWSWIRQPPGKGLEWIGYFSYSGSTNYNPSLKSRVTLSVDTSKNQFSLKLSSVTAADTAVYYCARNWAFHFDFWGQGTLVTVSSGGGGSGGGGSGGGGSQSVLTQPPSVSGAPGQRVTISCTGSSSNIGTGYAVHWYQQLPGTAPKLLIYGNNNRPSGVPDRFSGSKSGTSASLAITGLQAEDEADYYCQSYDSRLSGWVFGGGTKLTVLSGGGGSEVQLVESGGGLVQPGGSLKLSCAASGFTFNKYAMNWVRQAPGKGLEWVARIRSKYNNYATYYADSVKDRFTISRDDSKNTAYLQMNNLKTEDTAVYYCVRHGNFGNSYISYWAYWGQGTLVTVSSGGGGSGGGGSGGGGSQTVVTQEPSLTVSPGGTVTLTCGSSTGAVTSGNYPNWVQQKPGQAPRGLIGGTKFLAPGTPARFSGSLLGGKAALTLSGVQPEDEAEYYCVLWYSNRWVFGGGTKLTVLHHHHHH

SEQ ID NO: 1360 - protein, 5 aa, artificial
  CDR-H1 of CDH19 14049
SYSWS

SEQ ID NO: 1361 - protein, 16 aa, artificial
  CDR-H2 of CDH19 14049
YIYYSGSTNYNPSLKS

SEQ ID NO: 1362 - protein, 8 aa, artificial
  CDR-H3 of CDH19 14049
NWAFHFDY

SEQ ID NO: 1363 - protein, 14 aa, artificial
  CDR-L1 of CDH19 14049
TGSSSNIGTGYDVH

SEQ ID NO: 1364 - protein, 7 aa, artificial
  CDR-L2 of CDH19 14049
GNSNRPS

SEQ ID NO: 1365 - protein, 11 aa, artificial
  CDR-L3 of CDH19 14049
QSYDSSLSGWV

SEQ ID NO: 1366 - DNA, 348 bp, artificial
  VH of CDH19 14049
caggtgcagctgcaggagtcgggcccaggactggtgaagccttcggagaccctgtccctcacctgcactgtctctggtggctccatcagtagttactcctggagctggatccggcagcccccagggaagggactggagtggattgggtatatctattacagtgggagcaccaactacaacccctccctcaagagtcgagtcaccatatcattagacacgtccaagaaccagttctccctgaagctgagctctgtgaccgctgcggacacggccgtgtattactgtgcgaggaactgggccttccactttgactactggggccagggaaccctggtcaccgtctctagt

SEQ ID NO: 1367 - protein, 116 aa, artificial; identical to SEQ ID NO: 364
  VH of CDH19 14049

SEQ ID NO: 1368 - DNA, 333 bp, artificial
  VL of CDH19 14049
cagtctgtgctgacgcagccgccctcagtgtctggggccccagggcagagggtcaccatctcctgcactgggagcagctccaatatcgggacaggttatgatgtacactggtatcagcagcttccaggaacagcccccaaactcctcatctatggtaacagcaatcggccctcaggggtccctgaccgattctctggctccaagtctggcacctcagcctccctggccatcactgggctccaggctgaggatgaggctgattattactgccagtcctatgacagcagtctgagtggttgggtgttcggcggagggaccaggttgaccgtccta

SEQ ID NO: 1369 - protein, 111 aa, artificial
  VL of CDH19 14049
QSVLTQPPSVSGAPGQRVTISCTGSSSNIGTGYDVHWYQQLPGTAPKLLIYGNSNRPSGVPDRFSGSKSGTSASLAITGLQAEDEADYYCQSYDSSLSGWVFGGGTRLTVL

SEQ ID NO: 1370 - DNA, 726 bp, artificial
  VH-VL of CDH19 14049
caggtgcagctgcaggagtcgggcccaggactggtgaagccttcggagaccctgtccctcacctgcactgtctctggtggctccatcagtagttactcctggagctggatccggcagcccccagggaagggactggagtggattgggtatatctattacagtgggagcaccaactacaacccctccctcaagagtcgagtcaccatatcattagacacgtccaagaaccagttctccctgaagctgagctctgtgaccgctgcggacacggccgtgtattactgtgcgaggaactgggccttccactttgactactggggccagggaaccctggtcaccgtctctagtggtggcggaggatctggcggaggtggaagcggaggcggcggatctcagtctgtgctgacgcagccgccctcagtgtctggggccccagggcagagggtcaccatctcctgcactgggagcagctccaatatcgggacaggttatgatgtacactggtatcagcagcttccaggaacagcccccaaactcctcatctatggtaacagcaatcggccctcaggggtccctgaccgattctctggctccaagtctggcacctcagcctccctggccatcactgggctccaggctgaggatgaggctgattattactgccagtcctatgacagcagtctgagtggttgggtgttcggcggagggaccaggttgaccgtccta

SEQ ID NO: 1371 - protein, 242 aa, artificial
  VH-VL of CDH19 14049
QVQLQESGPGLVKPSETLSLTCTVSGGSISSYSWSWIRQPPGKGLEWIGYIYYSGSTNYNPSLKSRVTISLDTSKNQFSLKLSSVTAADTAVYYCARNWAFHFDYWGQGTLVTVSSGGGGSGGGGSGGGGSQSVLTQPPSVSGAPGQRVTISCTGSSSNIGTGYDVHWYQQLPGTAPKLLIYGNSNRPSGVPDRFSGSKSGTSASLAITGLQAEDEADYYCQSYDSSLSGWVFGGGTRLTVL

SEQ ID NO: 1372 - protein, 503 aa, artificial
  CDH19 14049 x I2C
QVQLQESGPGLVKPSETLSLTCTVSGGSISSYSWSWIRQPPGKGLEWIGYIYYSGSTNYNPSLKSRVTISLDTSKNQFSLKLSSVTAADTAVYYCARNWAFHFDYWGQGTLVTVSSGGGGSGGGGSGGGGSQSVLTQPPSVSGAPGQRVTISCTGSSSNIGTGYDVHWYQQLPGTAPKLLIYGNSNRPSGVPDRFSGSKSGTSASLAITGLQAEDEADYYCQSYDSSLSGWVFGGGTRLTVLSGGGGSEVQLVESGGGLVQPGGSLKLSCAASGFTFNKYAMNWVRQAPGKGLEWVARIRSKYNNYATYYADSVKDRFTISRDDSKNTAYLQMNNLKTEDTAVYYCVRHGNFGNSYISYWAYWGQGTLVTVSSGGGGSGGGGSGGGGSQTVVTQEPSLTVSPGGTVTLTCGSSTGAVTSGNYPNWVQQKPGQAPRGLIGGTKFLAPGTPARFSGSLLGGKAALTLSGVQPEDEAEYYCVLWYSNRWVFGGGTKLTVLHHHHHH

SEQ ID NO: 1373 - protein, 5 aa, artificial
  CDR-H1 of CDH19 14302
SYGMH

SEQ ID NO: 1374 - protein, 17 aa, artificial
  CDR-H2 of CDH19 14302
FIWYDGSNKYYADSVKD

SEQ ID NO: 1375 - protein, 16 aa, artificial
  CDR-H3 of CDH19 14302
RAGIIGTIGYYYGMDV

SEQ ID NO: 1376 - protein, 11 aa, artificial
  CDR-L1 of CDH19 14302
SGDRLGEKYTS

SEQ ID NO: 1377 - protein, 7 aa, artificial
  CDR-L2 of CDH19 14302
QDTKRPS

SEQ ID NO: 1378 - protein, 9 aa, artificial
  CDR-L3 of CDH19 14302
QAWESSTVV

SEQ ID NO: 1379 - DNA, 375 bp, artificial
  VH of CDH19 14302
caggtgcagttggtggagtctgggggaggcgtggtccagcctggggggtccctgagactctcctgtgcagcgtctggattcaccttcagtagctatggcatgcactgggtccgccaggctccaggcaaggggctggagtgggtggcatttatatggtatgatggaagtaataaatactatgcagactccgtgaaggaccgattcaccatctccagagacaattccaagaacacgctgtatctgcaaatgaatagcctgagagctgaggacacggctgtgtattactgtgcgagaagggccggtataataggaactataggctactactacggtatggacgtctggggccaagggaccacggtcaccgtctctagt

SEQ ID NO: 1380 - protein, 125 aa, artificial; identical to SEQ ID NO: 541
  VH of CDH19 14302

SEQ ID NO: 1381 - DNA, 318 bp, artificial; identical to SEQ ID NO: 1186
  VL of CDH19 14302

SEQ ID NO: 1382 - protein, 106 aa, artificial; identical to SEQ ID NO: 1187
  VL of CDH19 14302

SEQ ID NO: 1383 - DNA, 738 bp, artificial
  VH-VL of CDH19 14302
caggtgcagttggtggagtctgggggaggcgtggtccagcctggggggtccctgagactctcctgtgcagcgtctggattcaccttcagtagctatggcatgcactgggtccgccaggctccaggcaaggggctggagtgggtggcatttatatggtatgatggaagtaataaatactatgcagactccgtgaaggaccgattcaccatctccagagacaattccaagaacacgctgtatctgcaaatgaatagcctgagagctgaggacacggctgtgtattactgtgcgagaagggccggtataataggaactataggctactactacggtatggacgtctggggccaagggaccacggtcaccgtctctagtggtggcggaggatctggcggaggtggaagcggaggcggcggatcttcctatgaactgactcagccaccctcagtgtccgtgtccccaggacagacagccagcatcacctgctctggagataggttgggggaaaaatatactagctggtatcagcagaggccaggccagtcccctttgctggtcatctatcaagataccaagcggccctcagggatccctgagcgattctctggctccaactctggtaacacagccactctgaccatcagcgggacccaggctatggatgaggctgactattactgtcaggcgtgggagagcagcactgtggtattcggcggagggaccaagctgaccgtccta

SEQ ID NO: 1384 - protein, 246 aa, artificial
  VH-VL of CDH19 14302
QVQLVESGGGVVQPGGSLRLSCAASGFTFSSYGMHWVRQAPGKGLEWVAFIWYDGSNKYYADSVKDRFTISRDNSKNTLYLQMNSLRAEDTAVYYCARRAGIIGTIGYYYGMDVWGQGTTVTVSSGGGGSGGGGSGGGGSSYELTQPPSVSVSPGQTASITCSGDRLGEKYTSWYQQRPGQSPLLVIYQDTKRPSGIPERFSGSNSGNTATLTISGTQAMDEADYYCQAWESSTVVFGGGTKLTVL

SEQ ID NO: 1385 - protein, 507 aa, artificial
  CDH19 14302 x I2C
QVQLVESGGGVVQPGGSLRLSCAASGFTFSSYGMHWVRQAPGKGLEWVAFIWYDGSNKYYADSVKDRFTISRDNSKNTLYLQMNSLRAEDTAVYYCARRAGIIGTIGYYYGMDVWGQGTTVTVSSGGGGSGGGGSGGGGSSYELTQPPSVSVSPGQTASITCSGDRLGEKYTSWYQQRPGQSPLLVIYQDTKRPSGIPERFSGSNSGNTATLTISGTQAMDEADYYCQAWESSTVVFGGGTKLTVLSGGGGSEVQLVESGGGLVQPGGSLKLSCAASGFTFNKYAMNWVRQAPGKGLEWVARIRSKYNNYATYYADSVKDRFTISRDDSKNTAYLQMNNLKTEDTAVYYCVRHGNFGNSYISYWAYWGQGTLVTVSSGGGGSGGGGSGGGGSQTVVTQEPSLTVSPGGTVTLTCGSSTGAVTSGNYPNWVQQKPGQAPRGLIGGTKFLAPGTPARFSGSLLGGKAALTLSGVQPEDEAEYYCVLWYSNRWVFGGGTKLTVLHHHHHH

SEQ ID NO: 1386 - protein, 5 aa, artificial
  CDR-H1 of CDH19 14303
SYGMH

SEQ ID NO: 1387 - protein, 17 aa, artificial
  CDR-H2 of CDH19 14303
FIWYEGSNKYYAESVKD

SEQ ID NO: 1388 - protein, 16 aa, artificial
  CDR-H3 of CDH19 14303
RAGIIGTIGYYYGMDV

SEQ ID NO: 1389 - protein, 11 aa, artificial
  CDR-L1 of CDH19 14303
SGDRLGEKYTS

SEQ ID NO: 1390 - protein, 7 aa, artificial
  CDR-L2 of CDH19 14303
QDTKRPS

SEQ ID NO: 1391 - protein, 9 aa, artificial
  CDR-L3 of CDH19 14303
QAWESSTVV

SEQ ID NO: 1392 - DNA, 375 bp, artificial
  VH of CDH19 14303
caggtgcagttggtggagtctgggggaggcgtggtccagcctgggaggtccctgagactctcctgtgcagcgtctggattcaccttcagtagctatggcatgcactgggtccgccaggctccaggcaaggggctggagtgggtggcatttatatggtatgagggaagtaataaatactatgcagagtccgtgaaggaccgattcaccatctccagagacaattccaagaacacgctgtatctgcaaatgaaaagcctgagagctgaggacacggctgtgtattactgtgcgagaagggccggtataataggaactataggctactactacggtatggacgtctggggccaagggaccacggtcaccgtctctagt

SEQ ID NO: 1393 - protein, 125 aa, artificial; identical to SEQ ID NO: 542
  VH of CDH19 14303

SEQ ID NO: 1394 - DNA, 318 bp, artificial; identical to SEQ ID NO: 1186
  VL of CDH19 14303

SEQ ID NO: 1395 - protein, 106 aa, artificial; identical to SEQ ID NO: 1187
  VL of CDH19 14303

SEQ ID NO: 1396 - DNA, 738 bp, artificial
  VH-VL of CDH19 14303
caggtgcagttggtggagtctgggggaggcgtggtccagcctgggaggtccctgagactctcctgtgcagcgtctggattcaccttcagtagctatggcatgcactgggtccgccaggctccaggcaaggggctggagtgggtggcatttatatggtatgagggaagtaataaatactatgcagagtccgtgaaggaccgattcaccatctccagagacaattccaagaacacgctgtatctgcaaatgaaaagcctgagagctgaggacacggctgtgtattactgtgcgagaagggccggtataataggaactataggctactactacggtatggacgtctggggccaagggaccacggtcaccgtctctagtggtggcggaggatctggcggaggtggaagcggaggcggcggatcttcctatgaactgactcagccaccctcagtgtccgtgtccccaggacagacagccagcatcacctgctctggagataggttgggggaaaaatatactagctggtatcagcagaggccaggccagtcccctttgctggtcatctatcaagataccaagcggccctcagggatccctgagcgattctctggctccaactctggtaacacagccactctgaccatcagcgggacccaggctatggatgaggctgactattactgtcaggcgtgggagagcagcactgtggtattcggcggagggaccaagctgaccgtccta

SEQ ID NO: 1397 - protein, 246 aa, artificial
  VH-VL of CDH19 14303
QVQLVESGGGVVQPGRSLRLSCAASGFTFSSYGMHWVRQAPGKGLEWVAFIWYEGSNKYYAESVKDRFTISRDNSKNTLYLQMKSLRAEDTAVYYCARRAGIIGTIGYYYGMDVWGQGTTVTVSSGGGGSGGGGSGGGGSSYELTQPPSVSVSPGQTASITCSGDRLGEKYTSWYQQRPGQSPLLVIYQDTKRPSGIPERFSGSNSGNTATLTISGTQAMDEADYYCQAWESSTVVFGGGTKLTVL

SEQ ID NO: 1398 - protein, 507 aa, artificial
  CDH19 14303 x I2C
QVQLVESGGGVVQPGRSLRLSCAASGFTFSSYGMHWVRQAPGKGLEWVAFIWYEGSNKYYAESVKDRFTISRDNSKNTLYLQMKSLRAEDTAVYYCARRAGIIGTIGYYYGMDVWGQGTTVTVSSGGGGSGGGGSGGGGSSYELTQPPSVSVSPGQTASITCSGDRLGEKYTSWYQQRPGQSPLLVIYQDTKRPSGIPERFSGSNSGNTATLTISGTQAMDEADYYCQAWESSTVVFGGGTKLTVLSGGGGSEVQLVESGGGLVQPGGSLKLSCAASGFTFNKYAMNWVRQAPGKGLEWVARIRSKYNNYATYYADSVKDRFTISRDDSKNTAYLQMNNLKTEDTAVYYCVRHGNFGNSYISYWAYWGQGTLVTVSSGGGGSGGGGSGGGGSQTVVTQEPSLTVSPGGTVTLTCGSSTGAVTSGNYPNWVQQKPGQAPRGLIGGTKFLAPGTPARFSGSLLGGKAALTLSGVQPEDEAEYYCVLWYSNRWVFGGGTKLTVLHHHHHH

SEQ ID NO: 1399 - protein, 5 aa, artificial
  CDR-H1 of CDH19 14078
RYGIH

SEQ ID NO: 1400 - protein, 17 aa, artificial
  CDR-H2 of CDH19 14078
VIWYDGSNKYYADSVKG

SEQ ID NO: 1401 - protein, 16 aa, artificial
  CDR-H3 of CDH19 14078
RAGIPGTTGYYYGMDV

SEQ ID NO: 1402 - protein, 11 aa, artificial
  CDR-L1 of CDH19 14078
SGDRLGEKYVS

SEQ ID NO: 1403 - protein, 7 aa, artificial
  CDR-L2 of CDH19 14078
QDNKWPS

SEQ ID NO: 1404 - protein, 9 aa, artificial
  QDNKWPS
QAWDSSTVV

SEQ ID NO: 1405 - DNA, 375 bp, artificial
  VH of CDH19 14078
caggtgcagctggtggagtctgggggaggcgtggtccagcctggggggtccctgagactctcctgtgcagcgtctggattcaccttcagtcgctatggcatacactgggtccgccaggctccaggcaaggggctggagtgggtggcagttatatggtatgatggaagtaataaatactatgcagactccgtgaagggccgattcaccatctccagagacaattccaagaacacgctgtatctgcaaatgaacagcctgagagccgaggactcggctgtgtattactgtgcgagaagggccggtatacctggaactacgggctactactatggtatggacgtctggggccaagggaccacggtcaccgtctcctca

SEQ ID NO: 1406 - protein, 125 aa, artificial; identical to SEQ ID NO: 514
  VH of CDH19 14078

SEQ ID NO: 1407 - DNA, 318 bp, artificial; identical to SEQ ID NO: 1199
  VL of CDH19 14078

SEQ ID NO: 1408 - protein, 106 aa, artificial; identical to SEQ ID NO: 1200
  VL of CDH19 14078

SEQ ID NO: 1409 - DNA, 738 bp, artificial
  VH-VL of CDH19 14078
caggtgcagctggtggagtctgggggaggcgtggtccagcctggggggtccctgagactctcctgtgcagcgtctggattcaccttcagtcgctatggcatacactgggtccgccaggctccaggcaaggggctggagtgggtggcagttatatggtatgatggaagtaataaatactatgcagactccgtgaagggccgattcaccatctccagagacaattccaagaacacgctgtatctgcaaatgaacagcctgagagccgaggactcggctgtgtattactgtgcgagaagggccggtatacctggaactacgggctactactatggtatggacgtctggggccaagggaccacggtcaccgtctcctcaggtggcggaggatctggcggaggtggaagcggaggcggcggatcttcctatgagctgactcagccaccctcagtgtccgtgtccccaggacagacagccagcatcacctgctctggagatagattgggggagaaatatgttagctggtatcagcagaagccaggccagtcccctatactggtcatctatcaagataataagtggccctcagggatccctgagcgattctctggctccaactctgggaacacagccactctgaccatcagcgggacccaggctatggatgaggctgactattactgtcaggcgtgggacagcagcactgtggtattcggcggggggaccaagctgaccgtccta

SEQ ID NO: 1410 - protein, 246 aa, artificial
  VH-VL of CDH19 14078
QVQLVESGGGVVQPGGSLRLSCAASGFTFSRYGIHWVRQAPGKGLEWVAVIWYDGSNKYYADSVKGRFTISRDNSKNTLYLQMNSLRAEDSAVYYCARRAGIPGTTGYYYGMDVWGQGTTVTVSSGGGGSGGGGSGGGGSSYELTQPPSVSVSPGQTASITCSGDRLGEKYVSWYQQKPGQSPILVIYQDNKWPSGIPERFSGSNSGNTATLTISGTQAMDEADYYCQAWDSSTVVFGGGTKLTVL

SEQ ID NO: 1411 - protein, 507 aa, artificial
  CDH19 14078  x I2C
QVQLVESGGGVVQPGGSLRLSCAASGFTFSRYGIHWVRQAPGKGLEWVAVIWYDGSNKYYADSVKGRFTISRDNSKNTLYLQMNSLRAEDSAVYYCARRAGIPGTTGYYYGMDVWGQGTTVTVSSGGGGSGGGGSGGGGSSYELTQPPSVSVSPGQTASITCSGDRLGEKYVSWYQQKPGQSPILVIYQDNKWPSGIPERFSGSNSGNTATLTISGTQAMDEADYYCQAWDSSTVVFGGGTKLTVLSGGGGSEVQLVESGGGLVQPGGSLKLSCAASGFTFNKYAMNWVRQAPGKGLEWVARIRSKYNNYATYYADSVKDRFTISRDDSKNTAYLQMNNLKTEDTAVYYCVRHGNFGNSYISYWAYWGQGTLVTVSSGGGGSGGGGSGGGGSQTVVTQEPSLTVSPGGTVTLTCGSSTGAVTSGNYPNWVQQKPGQAPRGLIGGTKFLAPGTPARFSGSLLGGKAALTLSGVQPEDEAEYYCVLWYSNRWVFGGGTKLTVLHHHHHH

SEQ ID NO: 1412 - protein, 5 aa, artificial
  CDR-H1 of CDH19 14080
RYGIH

SEQ ID NO: 1413 - protein, 17 aa, artificial
  CDR-H2 of CDH19 14080
VIWYDGSNKYYADSVKG

SEQ ID NO: 1414 - protein, 16 aa, artificial
  CDR-H3 of CDH19 14080
RAGIPGTTGYYYGMDV

SEQ ID NO: 1415 - protein, 11 aa, artificial
  CDR-L1 of CDH19 14080
SGDRLGEKYVY

SEQ ID NO: 1416 - protein, 7 aa, artificial
  CDR-L2 of CDH19 14080
QDNKWPS

SEQ ID NO: 1417 - protein, 9 aa, artificial
  CDR-L3 of CDH19 14080
QAWDSSTVV

SEQ ID NO: 1418 - DNA, 375 bp, artificial; identical to SEQ ID NO: 389
  VH of CDH19 14080

SEQ ID NO: 1419 - protein, 125 aa, artificial; identical to SEQ ID NO: 390
  VH of CDH19 14080

SEQ ID NO: 1420 - DNA, 318 bp, artificial
  VL of CDH19 14080
tcctatgagctgactcagccaccctcagtgtccgtgtccccaggacagacagccagcatcacctgctctggagatagattgggggagaaatatgtttactggtatcagcagaagccaggccagtcccctatactggtcatctatcaagataataagtggccctcagggatccctgagcgattctctggctccaactctgggaacacagccactctgaccatcagcgggacccaggctatggatgaggctgactattactgtcaggcgtgggacagcagcactgtggtattcggcggggggaccaagctgaccgtccta

SEQ ID NO: 1421 - protein, 246 aa, artificial
  VL of CDH19 14080
QVQLVESGGGVVQPGRSLRLSCAASGFTFSRYGIHWVRQAPGKGLEWVAVIWYDGSNKYYADSVKGRFTISRDNSKNTLYLLMNSLRAEDSAVYYCARRAGIPGTTGYYYGMDVWGQGTTVTVSSGGGGSGGGGSGGGGSSYELTQPPSVSVSPGQTASITCSGDRLGEKYVYWYQQKPGQSPILVIYQDNKWPSGIPERFSGSNSGNTATLTISGTQAMDEADYYCQAWDSSTVVFGGGTKLTVL

SEQ ID NO: 1422 - DNA, 738 bp, artificial
  VH-VL of CDH19 14080
caggtgcagctggtggagtctgggggaggcgtggtccagcctgggaggtccctgagactctcctgtgcagcgtctggattcaccttcagtcgctatggcatacactgggtccgccaggctccaggcaaggggctggagtgggtggcagttatatggtatgatggaagtaataaatactatgcagactccgtgaagggccgattcaccatctccagagacaattccaagaacacgctgtatctgctaatgaacagcctgagagccgaggactcggctgtgtattactgtgcgagaagggccggtatacctggaactacgggctactactatggtatggacgtctggggccaagggaccacggtcaccgtctcctcaggtggcggaggatctggcggaggtggaagcggaggcggcggatcttcctatgagctgactcagccaccctcagtgtccgtgtccccaggacagacagccagcatcacctgctctggagatagattgggggagaaatatgtttactggtatcagcagaagccaggccagtcccctatactggtcatctatcaagataataagtggccctcagggatccctgagcgattctctggctccaactctgggaacacagccactctgaccatcagcgggacccaggctatggatgaggctgactattactgtcaggcgtgggacagcagcactgtggtattcggcggggggaccaagctgaccgtccta

SEQ ID NO: 1423 - protein, 246 aa, artificial; identical to SEQ ID NO: 1421
  VH-VL of CDH19 14080

SEQ ID NO: 1424 - protein, 507 aa, artificial
  CDH19 14080 x I2C
QVQLVESGGGVVQPGRSLRLSCAASGFTFSRYGIHWVRQAPGKGLEWVAVIWYDGSNKYYADSVKGRFTISRDNSKNTLYLLMNSLRAEDSAVYYCARRAGIPGTTGYYYGMDVWGQGTTVTVSSGGGGSGGGGSGGGGSSYELTQPPSVSVSPGQTASITCSGDRLGEKYVYWYQQKPGQSPILVIYQDNKWPSGIPERFSGSNSGNTATLTISGTQAMDEADYYCQAWDSSTVVFGGGTKLTVLSGGGGSEVQLVESGGGLVQPGGSLKLSCAASGFTFNKYAMNWVRQAPGKGLEWVARIRSKYNNYATYYADSVKDRFTISRDDSKNTAYLQMNNLKTEDTAVYYCVRHGNFGNSYISYWAYWGQGTLVTVSSGGGGSGGGGSGGGGSQTVVTQEPSLTVSPGGTVTLTCGSSTGAVTSGNYPNWVQQKPGQAPRGLIGGTKFLAPGTPARFSGSLLGGKAALTLSGVQPEDEAEYYCVLWYSNRWVFGGGTKLTVLHHHHHH

SEQ ID NO: 1425 - protein, 5 aa, artificial
  CDR-H1 of CDH19 13591
SYSWS

SEQ ID NO: 1426 - protein, 16 aa, artificial
  CDR-H2 of CDH19 13591
YIYYSGSTNYNPSLKS

SEQ ID NO: 1427 - protein, 8 aa, artificial
  CDR-H3 of CDH19 13591
NWAFHFDY

SEQ ID NO: 1428 - protein, 14 aa, artificial
  CDR-L1 of CDH19 13591
TGSSSNIGTGYDVH

SEQ ID NO: 1429 - protein, 7 aa, artificial
  CDR-L2 of CDH19 13591
GNSNRPS

SEQ ID NO: 1430 - protein, 11 aa, artificial
  CDR-L3 of CDH19 13591
QSYDSSLSGWV

SEQ ID NO: 1431 - DNA, 348 bp, artificial; identical to SEQ ID NO: 1366
  VH of CDH19 13591

SEQ ID NO: 1432 - protein, 116 aa, artificial; identical to SEQ ID NO: 364
  VH of CDH19 13591

SEQ ID NO: 1433 - DNA, 333 bp, artificial
  VL of CDH19 13591
cagtctgtgctgacgcagccgccctcagtgtctggggccccagggcagagggtcaccatctcctgcactgggagcagctccaatatcgggacaggttatgatgtacactggtatcagcagcttccaggaacagcccccaaactcctcatccatggtaacagcaatcggccctcaggggtccctgaccgattctctggctccaagtctggcacctcagcctccctggccatcactgggctccaggctgaggatgaggctgattattactgccagtcctatgacagcagtctgagtggttgggtgttcggcggagggaccaggttgaccgtccta

SEQ ID NO: 1434 - protein, 111 aa, artificial; identical to SEQ ID NO: 1174
  VL of CDH19 13591

SEQ ID NO: 1435 - DNA, 726 bp, artificial
  VH-VL of CDH19 1591
caggtgcagctgcaggagtcgggcccaggactggtgaagccttcggagaccctgtccctcacctgcactgtctctggtggctccatcagtagttactcctggagctggatccggcagcccccagggaagggactggagtggattgggtatatctattacagtgggagcaccaactacaacccctccctcaagagtcgagtcaccatatcattagacacgtccaagaaccagttctccctgaagctgagctctgtgaccgctgcggacacggccgtgtattactgtgcgaggaactgggccttccactttgactactggggccagggaaccctggtcaccgtctctagtggtggcggaggatctggcggaggtggaagcggaggcggcggatctcagtctgtgctgacgcagccgccctcagtgtctggggccccagggcagagggtcaccatctcctgcactgggagcagctccaatatcgggacaggttatgatgtacactggtatcagcagcttccaggaacagcccccaaactcctcatccatggtaacagcaatcggccctcaggggtccctgaccgattctctggctccaagtctggcacctcagcctccctggccatcactgggctccaggctgaggatgaggctgattattactgccagtcctatgacagcagtctgagtggttgggtgttcggcggagggaccaggttgaccgtccta

SEQ ID NO: 1436 - protein, 242 aa, artificial; identical to SEQ ID NO: 1176
  VH-VL of CDH19 1591

SEQ ID NO: 1437 - protein, 503 aa, artificial; identical to SEQ ID NO: 1177
  CDH19 13591 x I2C

SEQ ID NO: 1438 - protein, 5 aa, artificial
  CDR-H1 of CDH19 14299
SYSWS

SEQ ID NO: 1439 - protein, 16 aa, artificial
  CDR-H2 of CDH19 14299
YIYYSGSTNYNPSLKS

SEQ ID NO: 1440 - protein, 8 aa, artificial
  CDR-H3 of CDH19 14299
NWAFHFDY

SEQ ID NO: 1441 - protein, 14 aa, artificial
  CDR-L1 of CDH19 14299
TGSSSNIGTGYDVH

SEQ ID NO: 1442 - protein, 7 aa, artificial
  CDR-L2 of CDH19 14299
GNSNRPS

SEQ ID NO: 1443 - protein, 11 aa, artificial
  CDR-L3 of CDH19 14299
QSYDSSLSGWV

SEQ ID NO: 1444 - DNA, 348 bp, artificial; identical to SEQ ID NO: 1366
  VH of CDH19 14299

SEQ ID NO: 1445 - protein, 116 aa, artificial; identical to SEQ ID NO: 364
  VH of CDH19 14299

SEQ ID NO: 1446 - DNA, 333 bp, artificial; identical to SEQ ID NO: 1433
  VL of CDH19 14299

SEQ ID NO: 1447 - protein, 111 aa, artificial; identical to SEQ ID NO: 1174
  VL of CDH19 14299

SEQ ID NO: 1448 - DNA, 726 bp, artificial; identical to SEQ ID NO: 1435
  VH-VL of CDH19 14299

SEQ ID NO: 1449 - protein, 242 aa, artificial; identical to SEQ ID NO: 1176
  VH-VL of CDH19 14299

SEQ ID NO: 1450 - protein, 503 aa, artificial; identical to SEQ ID NO: 1177
  CDH19 14299 x I2C

SEQ ID NO: 1451 - protein, 784 aa, artificial
  ckCDH19(1-43)::FLAG::ckCDH19(44-776)
MNCSTFLSLVLALVQLQLCSPTTQIFSAQKTDQSYTTIRRVKRDYKDDDDKGWVWEPLFVTEEETSTMPMYVGQLKSDLDKEDGSLQYILTGEGADSIFFINEHGKIYVRQKLDREKKSFYILRAQVINRKTRHPIEPDSEFIIKVRDINDHEPQFLDGPYVATVPEMSPEGTSVTQVTATDGDDPSYGNNARLLYSLIQGQPYFSVEPKTGVIRMTSQMDRETKDQYLVVIQAKDMVGQAGAFSATATVTINLSDVNDNPPKFQQRLYYLNVSEEAPVGTTVGRLLAEDSDIGENAAMNYFIEEDSSDVFGIITDRETQEGIIILKKRVDYESKRKHSVRVKAVNRYIDDRFLKEGPFEDITIVQISVVDADEPPVFTLESYVMEIAEGVVSGSLVGTVSARDLDNDDSSVRYSIVQGLHLKRLFSINEHNGTIITTEPLDREKASWHNITVTATETRNPEKISEANVYIQVLDVNDHAPEFSKYYETFVCENAVPGQLIQNISAVDKDDSAENHRFYFSLAQATNSSHFTVKDNQDNTAGIFTAGSGFSRKEQFYFFLPILILDNGSPPLTSTNTLTVTVCDCDTEVNTLYCRYGAFLYSIGLSTEALVAVLACLLILLVFFLAIIGIRQQRKKTLFSEKVEEFRENIVRYDDEGGGEEDTEAFDISALRTRAVLRTHKPRKKITTEIHSLYRQSLQVGPDSAIFRQFISEKLEEANTDPSVPPYDSLQTYAFEGTGSLAGSLSSLGSNTSDVDQNYEYLVGWGPPFKQLAGMYTSQRSTRD

SEQ ID NO: 1452 - protein, 784 aa, artificial
  huCDH19(1-43)::FLAG::hu(44-141)::ckCDH19(142-776)
MNCYLLLRFMLGIPLLWPCLGATENSQTKKVKQPVRSHLRVKRDYKDDDDKGWVWNQFFVPEEMNTTSHHIGQLRSDLDNGNNSFQYKLLGAGAGSTFIIDERTGDIYAIQKLDREERSLYILRAQVIDIATGRAVEPESEFVIKVSDINDHEPQFLDGPYVATVPEMSPEGTSVTQVTATDGDDPSYGNNARLLYSLIQGQPYFSVEPKTGVIRMTSQMDRETKDQYLVVIQAKDMVGQAGAFSATATVTINLSDVNDNPPKFQQRLYYLNVSEEAPVGTTVGRLLAEDSDIGENAAMNYFIEEDSSDVFGIITDRETQEGIIILKKRVDYESKRKHSVRVKAVNRYIDDRFLKEGPFEDITIVQISVVDADEPPVFTLESYVMEIAEGVVSGSLVGTVSARDLDNDDSSVRYSIVQGLHLKRLFSINEHNGTIITTEPLDREKASWHNITVTATETRNPEKISEANVYIQVLDVNDHAPEFSKYYETFVCENAVPGQLIQNISAVDKDDSAENHRFYFSLAQATNSSHFTVKDNQDNTAGIFTAGSGFSRKEQFYFFLPILILDNGSPPLTSTNTLTVTVCDCDTEVNTLYCRYGAFLYSIGLSTEALVAVLACLLILLVFFLAIIGIRQQRKKTLFSEKVEEFRENIVRYDDEGGGEEDTEAFDISALRTRAVLRTHKPRKKITTEIHSLYRQSLQVGPDSAIFRQFISEKLEEANTDPSVPPYDSLQTYAFEGTGSLAGSLSSLGSNTSDVDQNYEYLVGWGPPFKQLAGMYTSQRSTRD

SEQ ID NO: 1453 - protein, 784 aa, artificial
  ckCDH19(1-43)::FLAG::ckCDH19(44-141)::huCDH19(142-249)::ckCDH19(2 50-776)
MNCSTFLSLVLALVQLQLCSPTTQIFSAQKTDQSYTTIRRVKRDYKDDDDKGWVWEPLFVTEEETSTMPMYVGQLKSDLDKEDGSLQYILTGEGADSIFFINEHGKIYVRQKLDREKKSFYILRAQVINRKTRHPIEPDSEFIIKVRDINDNEPKFLDEPYEAIVPEMSPEGTLVIQVTASDADDPSSGNNARLLYSLLQGQPYFSVEPTTGVIRISSKMDRELQDEYWVIIQAKDMIGQPGALSGTTSVLIKLSDVNDNPPKFQQRLYYLNVSEEAPVGTTVGRLLAEDSDIGENAAMNYFIEEDSSDVFGIITDRETQEGIIILKKRVDYESKRKHSVRVKAVNRYIDDRFLKEGPFEDITIVQISVVDADEPPVFTLESYVMEIAEGVVSGSLVGTVSARDLDNDDSSVRYSIVQGLHLKRLFSINEHNGTIITTEPLDREKASWHNITVTATETRNPEKISEANVYIQVLDVNDHAPEFSKYYETFVCENAVPGQLIQNISAVDKDDSAENHRFYFSLAQATNSSHFTVKDNQDNTAGIFTAGSGFSRKEQFYFFLPILILDNGSPPLTSTNTLTVTVCDCDTEVNTLYCRYGAFLYSIGLSTEALVAVLACLLILLVFFLAIIGIRQQRKKTLFSEKVEEFRENIVRYDDEGGGEEDTEAFDISALRTRAVLRTHKPRKKITTEIHSLYRQSLQVGPDSAIFRQFISEKLEEANTDPSVPPYDSLQTYAFEGTGSLAGSLSSLGSNTSDVDQNYEYLVGWGPPFKQLAGMYTSQRSTRD

SEQ ID NO: 1454 - protein, 784 aa, artificial
  ckCDH19(1-43)::FLAG::ckCDH19(44-249)::huCDH19(250-364)::ckCDH19(3 65-776)
MNCSTFLSLVLALVQLQLCSPTTQIFSAQKTDQSYTTIRRVKRDYKDDDDKGWVWEPLFVTEEETSTMPMYVGQLKSDLDKEDGSLQYILTGEGADSIFFINEHGKIYVRQKLDREKKSFYILRAQVINRKTRHPIEPDSEFIIKVRDINDHEPQFLDGPYVATVPEMSPEGTSVTQVTATDGDDPSYGNNARLLYSLIQGQPYFSVEPKTGVIRMTSQMDRETKDQYLVVIQAKDMVGQAGAFSATATVTINLSDVNDNKPIFKESLYRLTVSESAPTGTSIGTIMAYDNDIGENAEMDYSIEEDDSQTFDIITNHETQEGIVILKKKVDFEHQNHYGIRAKVKNHHVPEQLMKYHTEASTTFIKIQVEDVDEPPVFTLESYVMEIAEGVVSGSLVGTVSARDLDNDDSSVRYSIVQGLHLKRLFSINEHNGTIITTEPLDREKASWHNITVTATETRNPEKISEANVYIQVLDVNDHAPEFSKYYETFVCENAVPGQLIQNISAVDKDDSAENHRFYFSLAQATNSSHFTVKDNQDNTAGIFTAGSGFSRKEQFYFFLPILILDNGSPPLTSTNTLTVTVCDCDTEVNTLYCRYGAFLYSIGLSTEALVAVLACLLILLVFFLAIIGIRQQRKKTLFSEKVEEFRENIVRYDDEGGGEEDTEAFDISALRTRAVLRTHKPRKKITTEIHSLYRQSLQVGPDSAIFRQFISEKLEEANTDPSVPPYDSLQTYAFEGTGSLAGSLSSLGSNTSDVDQNYEYLVGWGPPFKQLAGMYTSQRSTRD

SEQ ID NO: 1455 - protein, 779 aa, artificial
  ckCDH19(1-43)::FLAG::ckCDH19(44-364)::huCDH19(365-463)::ckCDH19(4 69-776)
MNCSTFLSLVLALVQLQLCSPTTQIFSAQKTDQSYTTIRRVKRDYKDDDDKGWVWEPLFVTEEETSTMPMYVGQLKSDLDKEDGSLQYILTGEGADSIFFINEHGKIYVRQKLDREKKSFYILRAQVINRKTRHPIEPDSEFIIKVRDINDHEPQFLDGPYVATVPEMSPEGTSVTQVTATDGDDPSYGNNARLLYSLIQGQPYFSVEPKTGVIRMTSQMDRETKDQYLVVIQAKDMVGQAGAFSATATVTINLSDVNDNPPKFQQRLYYLNVSEEAPVGTTVGRLLAEDSDIGENAAMNYFIEEDSSDVFGIITDRETQEGIIILKKRVDYESKRKHSVRVKAVNRYIDDRFLKEGPFEDITIVQISVVDADEPPLFLLPYYVFEVFEETPQGSFVGVVSATDPDNRKSPIRYSITRSKVFNINDNGTITTSNSLDREISAWYNLSITATEKYNIEQISSIPLYVQVLNINDHAPEFSKYYETFVCENAVPGQLIQNISAVDKDDSAENHRFYFSLAQATNSSHFTVKDNQDNTAGIFTAGSGFSRKEQFYFFLPILILDNGSPPLTSTNTLTVTVCDCDTEVNTLYCRYGAFLYSIGLSTEALVAVLACLLILLVFFLAIIGIRQQRKKTLFSEKVEEFRENIVRYDDEGGGEEDTEAFDISALRTRAVLRTHKPRKKITTEIHSLYRQSLQVGPDSAIFRQFISEKLEEANTDPSVPPYDSLQTYAFEGTGSLAGSLSSLGSNTSDVDQNYEYLVGWGPPFKQLAGMYTSQRSTRD

SEQ ID NO: 1456 - protein, 785 aa, artificial
  (1-43)::FLAG::ckCDH19(44-468)::huCDH19(464-772)
MNCSTFLSLVLALVQLQLCSPTTQIFSAQKTDQSYTTIRRVKRDYKDDDDKGWVWEPLFVTEEETSTMPMYVGQLKSDLDKEDGSLQYILTGEGADSIFFINEHGKIYVRQKLDREKKSFYILRAQVINRKTRHPIEPDSEFIIKVRDINDHEPQFLDGPYVATVPEMSPEGTSVTQVTATDGDDPSYGNNARLLYSLIQGQPYFSVEPKTGVIRMTSQMDRETKDQYLVVIQAKDMVGQAGAFSATATVTINLSDVNDNPPKFQQRLYYLNVSEEAPVGTTVGRLLAEDSDIGENAAMNYFIEEDSSDVFGIITDRETQEGIIILKKRVDYESKRKHSVRVKAVNRYIDDRFLKEGPFEDITIVQISVVDADEPPVFTLESYVMEIAEGVVSGSLVGTVSARDLDNDDSSVRYSIVQGLHLKRLFSINEHNGTIITTEPLDREKASWHNITVTATETRNPEKISEANVYIQVLDVNDHAPEFSQYYETYVCENAGSGQVIQTISAVDRDESIEEHHFYFNLSVEDTNNSSFTIIDNQDNTAVILTNRTGFNLQEEPVFYISILIADNGIPSLTSTNTLTIHVCDCGDSGSTQTCQYQELVLSMGFKTEVIIAILICIMIIFGFIFLTLGLKQRRKQILFPEKSEDFRENIFQYDDEGGGEEDTEAFDIAELRSSTIMRERKTRKTTSAEIRSLYRQSLQVGPDSAIFRKFILEKLEEANTDPCAPPFDSLQTYAFEGTGSLAGSLSSLESAVSDQDESYDYLNELGPRFKRLACMFGSAVQSNN

SEQ ID NO: 1457 - protein, 780 aa, artificial
  rhCDH19(1-43)::FLAG::rhCDH19(44-772)
MNCYLLLPFMLGIPLLWPCLGATENSQTKKVQQPVGSHLRVKRDYKDDDDKGWVWNQFFVPEEMNTTSHHVGRLRSDLDNGNNSFQYKLLGAGAGSTFIIDERTGDIYAIEKLDREERSLYILRAQVIDITTGRAVEPESEFVIKVSDINDNEPKFLDEPYEAIVPEMSPEGTLVIQVTASDADDPSSGNNARLLYSLLQGQPYFSVEPTTGVIRISSKMDRELQDEYWVIIQAKDMIGQPGALSGTTSVLIKLSDVNDNKPIFKESLYRLTVSESAPTGTSIGTIMAYDNDIGENAEMDYSIEEDDSQTFDIITNHETQEGIVILKKKVNFEHQNHYGIRAKVKNHHVDEQLMKYHTEASTTFIKIQVEDVDEPPLFLLPYYIFEIFEETPQGSFVGVVSATDPDNRKSPIRYSITRSKVFNIDDNGTITTTNSLDREISAWYNLSITATEKYNIEQISSIPVYVQVLNINDHAPEFSQYYESYVCENAGSGQVIQTISAVDRDESIEEHHFYFNLSVEDTNSSSFTIIDNQDNTAVILTNRTGFNLQEEPIFYISILIADNGIPSLTSTNTLTIHVCDCDDSGSTQTCQYQELMLSMGFKTEVIIAILICIMVIFGFIFLTLGLKQRRKQILFPEKSEDFRENIFRYDDEGGGEEDTEAFDVAALRSSTIMRERKTRKTTSAEIRSLYRQSLQVGPDSAIFRKFILEKLEEADTDPCAPPFDSLQTYAFEGTGSLAGSLSSLESAVSDQDESYDYLNELGPRFKRLACMFGSAVQSNN

SEQ ID NO: 1458 - protein, 723 aa, artificial
  caCDH19(1-42)::FLAG::caCDH19(43-770)
QFFVPEEMNKTDYHIGQLRSDLDNGNNSFQYKLLGAGAGSIFVIDERTGDIYAIQKLDREERSLYTLRAQVIDSTTGRAVEPESEFVIRVSDINDNEPKFLDEPYEAIVPEMSPEGTLVIQVTATDADDPASGNNARLLYSLLQGQPYFSIEPTTGVIRISSKMDRELQDEYWVIIQAKDMIGLPGALSGTTSVLIKLSDVNDNKPIFKERLYRLTVSESAPTGTSIGRIMAYDNDIGENAEMDYSIEDDSQTFDIITNNETQEGIVILKKKVDFEHQNHYLIRANVKNRHVAEHLMEYHVEASTTFVRVQVEDEDEPPVFLLPYYLFEILEESPHGSFVGMVSATDPDQRKSPIRYSITRSKVFSIDDNGTIITTNPLDREISAWYNLSITATEKYNVQQISAVPVYVQVLNINDHAPEFSEYYDSYVCENAGSGQVIQTISAVDRDESVEDHHFYFNLSVEDTKNSSFIIIDNEDNTAVILTNRTGFSLQEEPVFYISVLIADNGIPSLTSTNTLTIHICDCDDYGSTQTCRDKDLLLSMGFRTEVILAILISIMIIFGFIFLILGLKQRRKPTLFPEKGEDFRENIFRYDDEGGGEEDTEAFDIVQLRSSTIMRERKTRKTAAAEIRSLYRQSLQVGPDSAIFRKFILEKLEEANTDPCAPPFDSLQTYAFEGTGSLAGSLSSLGSAVSDQDENYDYLNELGPRFKRLACMFGSAMQSNN

SEQ ID NO: 1459 - protein, 779 aa, artificial
  rhCDH19(1-43):FLAG::rhCDH19(44-141)::caCDH19(141-770)
MNCYLLLPFMLGIPLLWPCLGATENSQTKKVQQPVGSHLRVKRDYKDDDDKGWVWNQFFVPEEMNTTSHHVGRLRSDLDNGNNSFQYKLLGAGAGSTFIIDERTGDIYAIEKLDREERSLYILRAQVIDITTGRAVEPESEFVIKVSDINDNEPKFLDEPYEAIVPEMSPEGTLVIQVTATDADDPASGNNARLLYSLLQGQPYFSIEPTTGVIRISSKMDRELQDEYWVIIQAKDMIGLPGALSGTTSVLIKLSDVNDNKPIFKERLYRLTVSESAPTGTSIGRIMAYDNDIGENAEMDYSIEDDSQTFDIITNNETQEGIVILKKKVDFEHQNHYLIRANVKNRHVAEHLMEYHVEASTTFVRVQVEDEDEPPVFLLPYYLFEILEESPHGSFVGMVSATDPDQRKSPIRYSITRSKVFSIDDNGTIITTNPLDREISAWYNLSITATEKYNVQQISAVPVYVQVLNINDHAPEFSEYYDSYVCENAGSGQVIQTISAVDRDESVEDHHFYFNLSVEDTKNSSFIIIDNEDNTAVILTNRTGFSLQEEPVFYISVLIADNGIPSLTSTNTLTIHICDCDDYGSTQTCRDKDLLLSMGFRTEVILAILISIMIIFGFIFLILGLKQRRKPTLFPEKGEDFRENIFRYDDEGGGEEDTEAFDIVQLRSSTIMRERKTRKTAAAEIRSLYRQSLQVGPDSAIFRKFILEKLEEANTDPCAPPFDSLQTYAFEGTGSLAGSLSSLGSAVSDQDENYDYLNELGPRFKRLACMFGSAMQSNN

SEQ ID NO: 1460 - protein, 779 aa, artificial
  rhCDH19(1-43)::FLAG::rhCDH19(44-65)::caCDH19(65-770)
MNCYLLLPFMLGIPLLWPCLGATENSQTKKVQQPVGSHLRVKRDYKDDDDKGWVWNQFFVPEEMNTTSHHVGRLRSDLDNGNNSFQYKLLGAGAGSIFVIDERTGDIYAIQKLDREERSLYTLRAQVIDSTTGRAVEPESEFVIRVSDINDNEPKFLDEPYEAIVPEMSPEGTLVIQVTATDADDPASGNNARLLYSLLQGQPYFSIEPTTGVIRISSKMDRELQDEYWVIIQAKDMIGLPGALSGTTSVLIKLSDVNDNKPIFKERLYRLTVSESAPTGTSIGRIMAYDNDIGENAEMDYSIEDDSQTFDIITNNETQEGIVILKKKVDFEHQNHYLIRANVKNRHVAEHLMEYHVEASTTFVRVQVEDEDEPPVFLLPYYLFEILEESPHGSFVGMVSATDPDQRKSPIRYSITRSKVFSIDDNGTIITTNPLDREISAWYNLSITATEKYNVQQISAVPVYVQVLNINDHAPEFSEYYDSYVCENAGSGQVIQTISAVDRDESVEDHHFYFNLSVEDTKNSSFIIIDNEDNTAVILTNRTGFSLQEEPVFYISVLIADNGIPSLTSTNTLTIHICDCDDYGSTQTCRDKDLLLSMGFRTEVILAILISIMIIFGFIFLILGLKQRRKPTLFPEKGEDFRENIFRYDDEGGGEEDTEAFDIVQLRSSTIMRERKTRKTAAAEIRSLYRQSLQVGPDSAIFRKFILEKLEEANTDPCAPPFDSLQTYAFEGTGSLAGSLSSLGSAVSDQDENYDYLNELGPRFKRLACMFGSAMQSNN

SEQ ID NO: 1461 - protein, 778 aa, artificial
  caCDH19(1-43)::FLAG::caCDH19(44-87)::rhCDH19(89-114)::caCDH19(115 -770)
MNYCFLLPLMLGIPLIWPCFTASESSKTEVKHQAGSHLRVKRDYKDDDDKGWMWNQFFVPEEMNKTDYHIGQLRSDLDNGNNSFQYKLLGAGAGSTFIIDERTGDIYAIEKLDREERSLYILRAQVIDSTTGRAVEPESEFVIRVSDINDNEPKFLDEPYEAIVPEMSPEGTLVIQVTATDADDPASGNNARLLYSLLQGQPYFSIEPTTGVIRISSKMDRELQDEYWVIIQAKDMIGLPGALSGTTSVLIKLSDVNDNKPIFKERLYRLTVSESAPTGTSIGRIMAYDNDIGENAEMDYSIEDDSQTFDIITNNETQEGIVILKKKVDFEHQNHYLIRANVKNRHVAEHLMEYHVEASTTFVRVQVEDEDEPPVFLLPYYLFEILEESPHGSFVGMVSATDPDQRKSPIRYSITRSKVFSIDDNGTIITTNPLDREISAWYNLSITATEKYNVQQISAVPVYVQVLNINDHAPEFSEYYDSYVCENAGSGQVIQTISAVDRDESVEDHHFYFNLSVEDTKNSSFIIIDNEDNTAVILTNRTGFSLQEEPVFYISVLIADNGIPSLTSTNTLTIHICDCDDYGSTQTCRDKDLLLSMGFRTEVILAILISIMIIFGFIFLILGLKQRRKPTLFPEKGEDFRENIFRYDDEGGGEEDTEAFDIVQLRSSTIMRERKTRKTAAAEIRSLYRQSLQVGPDSAIFRKFILEKLEEANTDPCAPPFDSLQTYAFEGTGSLAGSLSSLGSAVSDQDENYDYLNELGPRFKRLACMFGSAMQSNN

SEQ ID NO: 1462 - protein, 778 aa, artificial
  caCDH19(1-43)::FLAG::caCDH19(44-120)::rhCDH19(122-137)::caCDH19(1 37-770)
MNYCFLLPLMLGIPLIWPCFTASESSKTEVKHQAGSHLRVKRDYKDDDDKGWMWNQFFVPEEMNKTDYHIGQLRSDLDNGNNSFQYKLLGAGAGSIFVIDERTGDIYAIQKLDREERSLYTLRAQVIDITTGRAVEPESEFVIKVSDINDNEPKFLDEPYEAIVPEMSPEGTLVIQVTATDADDPASGNNARLLYSLLQGQPYFSIEPTTGVIRISSKMDRELQDEYWVIIQAKDMIGLPGALSGTTSVLIKLSDVNDNKPIFKERLYRLTVSESAPTGTSIGRIMAYDNDIGENAEMDYSIEDDSQTFDIITNNETQEGIVILKKKVDFEHQNHYLIRANVKNRHVAEHLMEYHVEASTTFVRVQVEDEDEPPVFLLPYYLFEILEESPHGSFVGMVSATDPDQRKSPIRYSITRSKVFSIDDNGTIITTNPLDREISAWYNLSITATEKYNVQQISAVPVYVQVLNINDHAPEFSEYYDSYVCENAGSGQVIQTISAVDRDESVEDHHFYFNLSVEDTKNSSFIIIDNEDNTAVILTNRTGFSLQEEPVFYISVLIADNGIPSLTSTNTLTIHICDCDDYGSTQTCRDKDLLLSMGFRTEVILAILISIMIIFGFIFLILGLKQRRKPTLFPEKGEDFRENIFRYDDEGGGEEDTEAFDIVQLRSSTIMRERKTRKTAAAEIRSLYRQSLQVGPDSAIFRKFILEKLEEANTDPCAPPFDSLQTYAFEGTGSLAGSLSSLGSAVSDQDENYDYLNELGPRFKRLACMFGSAMQSNN

SEQ ID NO: 1463 - protein, 780 aa, artificial
  rhCDH19(1-43)::FLAG::rhCDH19(44-141)::raCDH19(140-247)::rhCDH19(2 50-772)
MNCYLLLPFMLGIPLLWPCLGATENSQTKKVQQPVGSHLRVKRDYKDDDDKGWVWNQFFVPEEMNTTSHHVGRLRSDLDNGNNSFQYKLLGAGAGSTFIIDERTGDIYAIEKLDREERSLYILRAQVIDITTGRAVEPESEFVIKVSDINDNEPRFLDEPYEAIVPEMSPEGTFVIKVTANDADDPTSGYHARILYNLEQGQPYFSVEPTTGVIRISSKMDRELQDTYCVIIQAKDMLGQPGALSGTTTISIKLSDINDNKPIFKESLYRLTVSESAPTGTSIGTIMAYDNDIGENAEMDYSIEEDDSQTFDIITNHETQEGIVILKKKVNFEHQNHYGIRAKVKNHHVDEQLMKYHTEASTTFIKIQVEDVDEPPLFLLPYYIFEIFEETPQGSFVGVVSATDPDNRKSPIRYSITRSKVFNIDDNGTITTTNSLDREISAWYNLSITATEKYNIEQISSIPVYVQVLNINDHAPEFSQYYESYVCENAGSGQVIQTISAVDRDESIEEHHFYFNLSVEDTNSSSFTIIDNQDNTAVILTNRTGFNLQEEPIFYISILIADNGIPSLTSTNTLTIHVCDCDDSGSTQTCQYQELMLSMGFKTEVIIAILICIMVIFGFIFLTLGLKQRRKQILFPEKSEDFRENIFRYDDEGGGEEDTEAFDVAALRSSTIMRERKTRKTTSAEIRSLYRQSLQVGPDSAIFRKFILEKLEEADTDPCAPPFDSLQTYAFEGTGSLAGSLSSLESAVSDQDESYDYLNELGPRFKRLACMFGSAVQSNN

SEQ ID NO: 1464 - protein, 778 aa, artificial
  raCDH19(1-43)::FLAG::raCDH19(44-770)
MNHYFLKYWILMVPLIWPCLKVAETLKIEKAQRAVPSLGRAKRDYKDDDDKGWVWKQFVVPEEMDTIQHVGRLRSDLDNGNNSFQYKLLGTGDGSFSIDEKTGDIFAMQKLDREKQSLYILRAQVIDTTIGKAVEPESEFVIRVSDVNDNEPRFLDEPYEAIVPEMSPEGTFVIKVTANDADDPTSGYHARILYNLEQGQPYFSVEPTTGVIRISSKMDRELQDTYCVIIQAKDMLGQPGALSGTTTISIKLSDINDNKPIFKESFYRFTISESAPSGTTIGKIMAYDDDIGENAEMDYSIEDDESQIFDIVIDNETQEGIVILKKKVDFEHQNHYGIRVKVKNCHVDEELAPAHVNASTTYIKVQVEDEDEPPTFLLPYYIFEIPEGKPYGTMVGTVSAVDPDRRQSPMRYSLIGSKMFDINGNGTIVTTNLLDREVSAWYNLSVTATETYNVQQISSAHVYVQVLNINDHAPEFSQLYETYVCENAESGEIIQTISAIDRDESIEDHHFYFNHSVEDTNNSSFILTDNQDNTAVILSNRAGFSLKEETVFYMIILIADNGIPPLTSTNTLTIQVCDCGDSRSTETCTSKELLFIMGFKAEAIIAIVICVMVIFGFIFLILALKQRRKETLFPEKTEDFRENIFCYDDEGGGEEDSEAFDIIELRQSTVMRERKPRKSRSAEIRSLYRQSLQVGPDSAIFRKFILEKLEEANTDSSAPPFDSLQTFAYEGTGSSAGSLSSLGSSVTDQEDDFDYLNDLGPCFKRLANMFGSAVQPDN

SEQ ID NO: 1465 - protein, 778 aa, artificial
  (1-43)::FLAG::muCDH19(44-323)::raCDH19(324-327)::muCDH19(328-770)
MNYCFLKHWILMIPLLWPCLKVSETLKAEKARRTVPSTWRAKRDYKDDDDKAWVWRPFVVLEEMDDIQCVGKLRSDLDNGNNSFQYKLLGIGAGSFSINERTGEICAIQKLDREEKSLYILRAQVIDTTIGKAVETESEFVIRVLDINDNEPRFLDEPYEAIVPEMSPEGTFVIKVTANDADDPSTGYHARILYNLERGQPYFSVEPTTGVIRISSKMDRELQDTYCVIIQAKDMLGQPGALSGTTTVSIKLSDINDNKPIFKESFYRFTISESAPIGTSIGKIMAYDDDIGENAEMEYSIEDDDSKIFDIIIDNDTQEGIVILKKKVDFEHQNHYGIRAKVKNCHVDEELAPAHVNASTTYIKVQVEDEDEPPVFLLPYYILEIPEGKPYGTIVGTVSATDPDRRQSPMRYYLTGSKMFDINDNGTIITTNMLDREVSAWYNLTVTATETYNVQQISSAHVYVQVFNINDNAPEFSQFYETYVCENAESGEIVQIISAIDRDESIEDHHFYFNHSLEDTNNSSFMLTDNQDNTAVILSNRTGFNLKEEPVFYMIILIADNGIPSLTSTNTLTIQVCDCGDSRNTETCANKGLLFIMGFRTEAIIAIMICVMVIFGFFFLILALKQRRKETLFPEKTEDFRENIFCYDDEGGGEEDSEAFDIVELRQSTVMRERKPQRSKSAEIRSLYRQSLQVGPDSAIFRKFILEKLEEANTDPCAPPFDSLQTFAYEGTGSSAGSLSSLASRDTDQEDDFDYLNDLGPRFKRLASMFGSAVQPNN

SEQ ID NO: 1466 - protein, 778 aa, artificial
  muCDH19(1-43)::FLAG::muCDH19(44-770)::raCDH19(290,299,308)
MNYCFLKHWILMIPLLWPCLKVSETLKAEKARRTVPSTWRAKRDYKDDDDKAWVWRPFVVLEEMDDIQCVGKLRSDLDNGNNSFQYKLLGIGAGSFSINERTGEICAIQKLDREEKSLYILRAQVIDTTIGKAVETESEFVIRVLDINDNEPRFLDEPYEAIVPEMSPEGTFVIKVTANDADDPSTGYHARILYNLERGQPYFSVEPTTGVIRISSKMDRELQDTYCVIIQAKDMLGQPGALSGTTTVSIKLSDINDNKPIFKESFYRFTISESAPIGTSIGKIMAYDDDIGENAEMEYSIEDDDSKIFDIIIDNDTQEGIVILKKKVDFEQQSYYGIRAKVKNCHVDEELAPAHVNASTTYIKVQVEDEDEPPVFLLPYYILEIPEGKPYGTIVGTVSATDPDRRQSPMRYYLTGSKMFDINDNGTIITTNMLDREVSAWYNLTVTATETYNVQQISSAHVYVQVFNINDNAPEFSQFYETYVCENAESGEIVQIISAIDRDESIEDHHFYFNHSLEDTNNSSFMLTDNQDNTAVILSNRTGFNLKEEPVFYMIILIADNGIPSLTSTNTLTIQVCDCGDSRNTETCANKGLLFIMGFRTEAIIAIMICVMVIFGFFFLILALKQRRKETLFPEKTEDFRENIFCYDDEGGGEEDSEAFDIVELRQSTVMRERKPQRSKSAEIRSLYRQSLQVGPDSAIFRKFILEKLEEANTDPCAPPFDSLQTFAYEGTGSSAGSLSSLASRDTDQEDDFDYLNDLGPRFKRLASMFGSAVQPNN

SEQ ID NO: 1467 - protein, 778 aa, artificial
  muCDH19(1-43)::FLAG::muCDH19(44-770)::huCDH19(271)
MNYCFLKHWILMIPLLWPCLKVSETLKAEKARRTVPSTWRAKRDYKDDDDKAWVWRPFVVLEEMDDIQCVGKLRSDLDNGNNSFQYKLLGIGAGSFSINERTGEICAIQKLDREEKSLYILRAQVIDTTIGKAVETESEFVIRVLDINDNEPRFLDEPYEAIVPEMSPEGTFVIKVTANDADDPSTGYHARILYNLERGQPYFSVEPTTGVIRISSKMDRELQDTYCVIIQAKDMLGQPGALSGTTTVSIKLSDINDNKPIFKESFYRFTISESAPTGTSIGKIMAYDDDIGENAEMEYSIEDDDSKIFDIIIDNDTQEGIVILKKKVDFEQQSYYGIRAKVKNCHVDEELAPAHVNASTTYIKVQVEDEDEPPVFLLPYYILEIPEGKPYGTIVGTVSATDPDRRQSPMRYYLTGSKMFDINDNGTIITTNMLDREVSAWYNLTVTATETYNVQQISSAHVYVQVFNINDNAPEFSQFYETYVCENAESGEIVQIISAIDRDESIEDHHFYFNHSLEDTNNSSFMLTDNQDNTAVILSNRTGFNLKEEPVFYMIILIADNGIPSLTSTNTLTIQVCDCGDSRNTETCANKGLLFIMGFRTEAIIAIMICVMVIFGFFFLILALKQRRKETLFPEKTEDFRENIFCYDDEGGGEEDSEAFDIVELRQSTVMRERKPQRSKSAEIRSLYRQSLQVGPDSAIFRKFILEKLEEANTDPCAPPFDSLQTFAYEGTGSSAGSLSSLASRDTDQEDDFDYLNDLGPRFKRLASMFGSAVQPNN

SEQ ID NO: 1468 - protein, 14 aa, Artificial
  unknown organism
GSSTGAVTSGNYPN

SEQ ID NO: 1469 - protein, 7 aa, Artificial
  unknown organism
GTKFLAP

SEQ ID NO: 1470 - protein, 9 aa, Artificial
  unknown organism
VLWYSNRWV

SEQ ID NO: 1471 - protein, 5 aa, Artificial
  unknown organism
KYAMN

SEQ ID NO: 1472 - protein, 19 aa, Artificial
  unknown organism
RIRSKYNNYATYYADSVKD

SEQ ID NO: 1473 - protein, 14 aa, Artificial
  unknown organism
HGNFGNSYISYWAY

SEQ ID NO: 1474 - protein, 125 aa, Artificial
  unknown organism
EVQLVESGGGLVQPGGSLKLSCAASGFTFNKYAMNWVRQAPGKGLEWVARIRSKYNNYATYYADSVKDRFTISRDDSKNTAYLQMNNLKTEDTAVYYCVRHGNFGNSYISYWAYWGQGTLVTVSS

SEQ ID NO: 1475 - protein, 109 aa, Artificial
  unknown organism
QTVVTQEPSLTVSPGGTVTLTCGSSTGAVTSGNYPNWVQQKPGQAPRGLIGGTKFLAPGTPARFSGSLLGGKAALTLSGVQPEDEAEYYCVLWYSNRWVFGGGTKLTVL

SEQ ID NO: 1476 - protein, 249 aa, Artificial
  unknown organism
EVQLVESGGGLVQPGGSLKLSCAASGFTFNKYAMNWVRQAPGKGLEWVARIRSKYNNYATYYADSVKDRFTISRDDSKNTAYLQMNNLKTEDTAVYYCVRHGNFGNSYISYWAYWGQGTLVTVSSGGGGSGGGGSGGGGSQTVVTQEPSLTVSPGGTVTLTCGSSTGAVTSGNYPNWVQQKPGQAPRGLIGGTKFLAPGTPARFSGSLLGGKAALTLSGVQPEDEAEYYCVLWYSNRWVFGGGTKLTVL

SEQ ID NO: 1477 - protein, 14 aa, Artificial
  unknown organism
GSSTGAVTSGYYPN

SEQ ID NO: 1478 - protein, 7 aa, Artificial
  unknown organism
GTKFLAP

SEQ ID NO: 1479 - protein, 9 aa, Artificial
  unknown organism
ALWYSNRWV

SEQ ID NO: 1480 - protein, 5 aa, Artificial
  unknown organism
KYAMN

SEQ ID NO: 1481 - protein, 19 aa, Artificial
  unknown organism
RIRSKYNNYATYYADSVKD

SEQ ID NO: 1482 - protein, 14 aa, Artificial
  unknown organism
HGNFGNSYISYWAY

SEQ ID NO: 1483 - protein, 125 aa, Artificial; identical to SEQ ID NO: 1474
  unknown organism

SEQ ID NO: 1484 - protein, 109 aa, Artificial
  unknown organism
QTVVTQEPSLTVSPGGTVTLTCGSSTGAVTSGYYPNWVQQKPGQAPRGLIGGTKFLAPGTPARFSGSLLGGKAALTLSGVQPEDEAEYYCALWYSNRWVFGGGTKLTVL

SEQ ID NO: 1485 - protein, 249 aa, Artificial
  unknown organism
EVQLVESGGGLVQPGGSLKLSCAASGFTFNKYAMNWVRQAPGKGLEWVARIRSKYNNYATYYADSVKDRFTISRDDSKNTAYLQMNNLKTEDTAVYYCVRHGNFGNSYISYWAYWGQGTLVTVSSGGGGSGGGGSGGGGSQTVVTQEPSLTVSPGGTVTLTCGSSTGAVTSGYYPNWVQQKPGQAPRGLIGGTKFLAPGTPARFSGSLLGGKAALTLSGVQPEDEAEYYCALWYSNRWVFGGGTKLTVL

SEQ ID NO: 1486 - protein, 14 aa, Artificial
  unknown organism
GSSTGAVTSGNYPN

SEQ ID NO: 1487 - protein, 7 aa, Artificial
  unknown organism
GTKFLAP

SEQ ID NO: 1488 - protein, 9 aa, Artificial
  unknown organism
VLWYSNRWV

SEQ ID NO: 1489 - protein, 5 aa, Artificial
  unknown organism
SYAMN

SEQ ID NO: 1490 - protein, 19 aa, Artificial
  unknown organism
RIRSKYNNYATYYADSVKG

SEQ ID NO: 1491 - protein, 14 aa, Artificial
  unknown organism
HGNFGNSYVSWWAY

SEQ ID NO: 1492 - protein, 125 aa, Artificial
  unknown organism
EVQLVESGGGLVQPGGSLKLSCAASGFTFNSYAMNWVRQAPGKGLEWVARIRSKYNNYATYYADSVKGRFTISRDDSKNTAYLQMNNLKTEDTAVYYCVRHGNFGNSYVSWWAYWGQGTLVTVSS

SEQ ID NO: 1493 - protein, 109 aa, Artificial; identical to SEQ ID NO: 1475
  unknown organism

SEQ ID NO: 1494 - protein, 249 aa, Artificial
  unknown organism
EVQLVESGGGLVQPGGSLKLSCAASGFTFNSYAMNWVRQAPGKGLEWVARIRSKYNNYATYYADSVKGRFTISRDDSKNTAYLQMNNLKTEDTAVYYCVRHGNFGNSYVSWWAYWGQGTLVTVSSGGGGSGGGGSGGGGSQTVVTQEPSLTVSPGGTVTLTCGSSTGAVTSGNYPNWVQQKPGQAPRGLIGGTKFLAPGTPARFSGSLLGGKAALTLSGVQPEDEAEYYCVLWYSNRWVFGGGTKLTVL

SEQ ID NO: 1495 - protein, 14 aa, Artificial
  unknown organism
RSSTGAVTSGYYPN

SEQ ID NO: 1496 - protein, 7 aa, Artificial
  unknown organism
ATDMRPS

SEQ ID NO: 1497 - protein, 9 aa, Artificial
  unknown organism
ALWYSNRWV

SEQ ID NO: 1498 - protein, 5 aa, Artificial
  unknown organism
VYAMN

SEQ ID NO: 1499 - protein, 19 aa, Artificial
  unknown organism
RIRSKYNNYATYYADSVKK

SEQ ID NO: 1500 - protein, 14 aa, Artificial
  unknown organism
HGNFGNSYLSWWAY

SEQ ID NO: 1501 - protein, 125 aa, Artificial
  unknown organism
EVQLVESGGGLVQPGGSLKLSCAASGFTFNVYAMNWVRQAPGKGLEWVARIRSKYNNYATYYADSVKKRFTISRDDSKNTAYLQMNNLKTEDTAVYYCVRHGNFGNSYLSWWAYWGQGTLVTVSS

SEQ ID NO: 1502 - protein, 109 aa, Artificial
  unknown organism
QTVVTQEPSLTVSPGGTVTLTCRSSTGAVTSGYYPNWVQQKPGQAPRGLIGATDMRPSGTPARFSGSLLGGKAALTLSGVQPEDEAEYYCALWYSNRWVFGGGTKLTVL

SEQ ID NO: 1503 - protein, 249 aa, Artificial
  unknown organism
EVQLVESGGGLVQPGGSLKLSCAASGFTFNVYAMNWVRQAPGKGLEWVARIRSKYNNYATYYADSVKKRFTISRDDSKNTAYLQMNNLKTEDTAVYYCVRHGNFGNSYLSWWAYWGQGTLVTVSSGGGGSGGGGSGGGGSQTVVTQEPSLTVSPGGTVTLTCRSSTGAVTSGYYPNWVQQKPGQAPRGLIGATDMRPSGTPARFSGSLLGGKAALTLSGVQPEDEAEYYCALWYSNRWVFGGGTKLTVL

SEQ ID NO: 1504 - protein, 14 aa, Artificial
  unknown organism
GSSTGAVTSGYYPN

SEQ ID NO: 1505 - protein, 7 aa, Artificial
  unknown organism
GTKFLAP

SEQ ID NO: 1506 - protein, 9 aa, Artificial
  unknown organism
ALWYSNRWV

SEQ ID NO: 1507 - protein, 5 aa, Artificial
  unknown organism
KYAMN

SEQ ID NO: 1508 - protein, 19 aa, Artificial
  unknown organism
RIRSKYNNYATYYADSVKS

SEQ ID NO: 1509 - protein, 14 aa, Artificial
  unknown organism
HGNFGNSYTSYYAY

SEQ ID NO: 1510 - protein, 125 aa, Artificial
  unknown organism
EVQLVESGGGLVQPGGSLKLSCAASGFTFNKYAMNWVRQAPGKGLEWVARIRSKYNNYATYYADSVKSRFTISRDDSKNTAYLQMNNLKTEDTAVYYCVRHGNFGNSYTSYYAYWGQGTLVTVSS

SEQ ID NO: 1511 - protein, 109 aa, Artificial; identical to SEQ ID NO: 1484
  unknown organism

SEQ ID NO: 1512 - protein, 249 aa, Artificial
  unknown organism
EVQLVESGGGLVQPGGSLKLSCAASGFTFNKYAMNWVRQAPGKGLEWVARIRSKYNNYATYYADSVKSRFTISRDDSKNTAYLQMNNLKTEDTAVYYCVRHGNFGNSYTSYYAYWGQGTLVTVSSGGGGSGGGGSGGGGSQTVVTQEPSLTVSPGGTVTLTCGSSTGAVTSGYYPNWVQQKPGQAPRGLIGGTKFLAPGTPARFSGSLLGGKAALTLSGVQPEDEAEYYCALWYSNRWVFGGGTKLTVL

SEQ ID NO: 1513 - protein, 5 aa, Artificial Sequence
  Synthetic linker
GGGGS

SEQ ID NO: 1514 - DNA, 37 bp, Artificial Sequence
  Synthetic primer
cctggcacccagcacaagccgatccacacggagtact

SEQ ID NO: 1515 - DNA, 26 bp, Artificial Sequence
  Synthetic probe
atcaagatcattgctcctcctgagcg
